(19) United States
(12) Patent Application Publication
(10) Pub. No.: US 2024/0025984 A1
(43) Pub. Date: Jan. 25, 2024

(54) CYTOSOLIC PROTEIN TARGETING DEUBIQUITINASES AND METHODS OF USE

(71) Applicant: FLUX THERAPEUTICS, INC., NEW YORK, NY (US)

(72) Inventors: Andreas LOEW, MATTAPOISETT, MA (US); Samuel W. HALL, Brooklyn, NY (US)

(21) Appl. No.: 18/251,854

(22) PCT Filed: Nov. 5, 2021
(86) PCT No.: PCT/US2021/058285

§ 371 Date: May 4, 2023

Related U.S. Application Data
(60) Provisional application No. 63/110,622, filed on Nov. 6, 2020.

(51) Int. Cl. C07K 16/24; C12N 9/48; C07K 16/18; C07K 16/28; C07K 16/38

(52) U.S. Cl. CPC C07K 16/24; C12N 9/485; C12Y 304/19012; C12Y 304/19; C07K 16/18; C07K 16/2896; C07K 16/38; C07K 2319/30; C07K 2319/50; C07K 2317/569; A61K 39/00

(57) ABSTRACT

Provided herein are fusion protein comprising: an effector domain comprising a catalytic domain of a deubiquitinase, or a functional fragment or functional variant thereof; and a targeting domain comprising a moiety that specifically binds a cytosolic protein. Also provided herein are methods of using the fusion proteins to treat a disease, including genetic diseases.

### CROSS-REFERENCE TO RELATED APPLICATIONS

[0001] This application claims the benefit under 35 U.S.C. § 119(e) of U.S. Provisional Patent Application No. 63/110,622, filed Nov. 6, 2020, the entire disclosure of which is incorporated herein by reference.

### 1. FIELD

[0002] This disclosure relates to fusion proteins comprising an effector domain comprising a catalytic domain of a deubiquitinase, or a functional fragment or functional variant thereof; and a targeting domain comprising a moiety that specifically binds a target cytosolic protein. The disclosure further relates to therapeutic methods of using the same.

### 2. BACKGROUND

[0003] A subset of genetic diseases are associated with a decrease in the level of expression of a functional cytosolic protein or a decrease in the stability of a cytosolic protein. For example, haploinsufficiency genetic diseases are caused by the presence a single copy of a wild-type allele in heterozygous combination with a loss of function variant allele, wherein the level of functional protein expressed is insufficient to produce the standard phenotype. Haploinsufficiency can arise from a de novo or inherited loss-of-function mutation in the variant allele, such that it produces little or no functional protein. Despite recent developments in gene therapy, there are still no curative treatments for these diseases, and treatment typically centers on the management of symptoms. Therefore, new treatments are needed for diseases, e.g., genetic diseases, that are associated with decreased functional cytosolic protein expression or stability.

### 3. SUMMARY

[0004] Provided herein are, inter alia, engineered deubiquitinases (enDubs) that comprise a targeting moiety that specifically binds a cytosolic target protein and a catalytic domain of a deubiquitinase. The targeting moiety directs that deubiquitinase catalytic domain to the specific target cytosolic protein for deubiquitination. The fusion proteins described herein are particularly useful in methods of treating genetic diseases, particularly those associated with or caused by decreased expression or stability of a specific cytosolic protein.

[0005] In one aspect, provided herein are fusion proteins comprising: an effector domain comprising a catalytic domain of a deubiquitinase, or a functional fragment or functional variant thereof; and a targeting domain comprising a targeting moiety that specifically binds a cytosolic protein.

[0006] In some embodiments, the deubiquitinase is a cysteine protease or a metalloprotease.

[0007] In some embodiments, the deubiquitinase is a cysteine protease. In some embodiments, the cysteine protease is a ubiquitin-specific protease (USP), a ubiquitin C-terminal hydrolase (UCH), a Machado-Josephin domain protease (MJD), an ovarian tumour protease (OTU), a MINDY protease, or a ZUFSP protease. In some embodiments, the cysteine protease is a USP. In some embodiments, the USP is USP1, USP2, USP3, USP4, USP5, USP6, USP7, USP8, USP9X, USP9Y, USP10, USP11, USP12, USP13, USP14, USP15, USP16, USP17, USP17L2, USP17L3, USP17L4, USP17L5, USP17L7, USP17L8, USP18, USP19, USP20, USP21, USP22, USP23, USP24, USP25, USP26, USP27X, USP28, USP29, USP30, USP31, USP32, USP33, USP34, USP35, USP36, USP37, USP38, USP39, USP40, USP41, USP42, USP43, USP44, USP45, or USP46.

[0008] In some embodiments, the cysteine protease is a UCH. In some embodiments, the UCH is BAP1, UCHL1, UCHL3, or UCHL5.

[0009] In some embodiments, the cysteine protease is a MJD. In some embodiments, the MJD is ATXN3 or ATXN3L.

[0010] In some embodiments, the cysteine protease is an OTU. In some embodiments, the OTU is OTUB1 or OTUB2.

[0011] In some embodiments, the cysteine protease is a MINDY. In some embodiments, the MINDY MINDY1, MINDY2, MINDY3, or MINDY4.

[0012] In some embodiments, the cysteine protease is a ZUFSP. In some embodiments, the ZUFSP is ZUP1.

[0013] In some embodiments, the deubiquitinase is a metalloprotease. In some embodiments, the metalloprotease is a Jab1/Mov34/Mpr1 Pad1 N-terminal+(MPN+) (JAMM) domain protease.

[0014] In some embodiments, the deubiquitinase comprises an amino acid sequence at least 80%, 81%, 82%, 83%, 84%, 85%, 86%, 87%, 88%, 89%, 90%, 91%, 92%, 93%, 94%, 95%, 96%, 97%, 98%, 99%, or 100% identical to the amino acid sequence of any one of SEQ ID NOS: 1-112.

[0015] In some embodiments, the catalytic domain comprises a catalytic domain derived from a deubiquitinase comprising an amino acid sequence at least 80%, 81%, 82%, 83%, 84%, 85%, 86%, 87%, 88%, 89%, 90%, 91%, 92%, 93%, 94%, 95%, 96%, 97%, 98%, 99%, or 100% identical to the amino acid sequence of any one of SEQ ID NOS: 1-112.

[0016] In some embodiments, the catalytic domain comprises an amino acid sequence at least 80%, 81%, 82%, 83%, 84%, 85%, 86%, 87%, 88%, 89%, 90%, 91%, 92%, 93%, 94%, 95%, 96%, 97%, 98%, 99%, or 100% identical to the amino acid sequence of any one of SEQ ID NOS: 113-220 or 286.

[0017] In some embodiments, the catalytic domain comprises an amino acid sequence at least 80%, 81%, 82%, 83%, 84%, 85%, 86%, 87%, 88%, 89%, 90%, 91%, 92%, 93%, 94%, 95%, 96%, 97%, 98%, 99%, or 100% identical to the amino acid sequence of SEQ ID NO: 286.

[0018] In some embodiments, the catalytic domain comprises an amino acid sequence that is a functional fragment of the amino acid sequence of any one of SEQ ID NOS: 1-112.

[0019] In some embodiments, the catalytic domain comprises an amino acid sequence that is a functional fragment of the amino acid sequence of any one of SEQ ID NOS: 113-220 or 286.

[0020] In some embodiments, the moiety that specifically binds a cytosolic protein comprises an antibody, or functional fragment or functional variant thereof. In some embodiments, the antibody, or functional fragment or functional variant thereof, comprises a full-length antibody, a single chain variable fragment (scFv), a scFv2, a scFv-Fc, a Fab, a Fab′, a F(ab′)2, a F(v), a VHH, or a (VHH)₂. In some embodiments, the antibody, or functional fragment or functional variant thereof, comprises a VHH or a (VHH)₂.

[0021] In some embodiments, the cytosolic protein is cyclin-dependent kinase-like 5 (CDKL5), copper-transporting ATPase 2 (ATP7B), syntaxin-binding protein 1 (STXBP1), Ras/Rap GTPase-activating protein (SYNGAP1), progranulin (GRN), protein jagged-1 (JAG1), GATOR complex protein DEPDC5 (DEPDC5), tuberin (TSC2), hamartin (TSC1), kinesin-like protein KIF1A (KIF1A), dynamin-1 (DNM1), SH3 and multiple ankyrin repeat domains protein 3 (SHANK3), dystrophin (DMD), oxygen-regulated protein 1 (RP1), titin (TTN), cytoplasmic dynein 1 heavy chain 1 (DYNCIHI), TRIO and F-actin-binding protein (TRIO), probable ubiquitin carboxyl-terminal hydrolase FAF-X (USP9X), cystatin-B (CSTB), or pterin-4-alpha-carbinolamine dehydratase (PCBD1).

[0022] In some embodiments, the cytosolic protein comprises an amino acid sequence at least 90%, 91%, 92%, 93%, 94%, 95%, 96%, 97%, 98%, 99%, or 100% identical to any one of SEQ ID NOS: 221-328 or 287-289.

[0023] In some embodiments, the effector domain is directly fused to the targeting domain. In some embodiments, the effector domain is indirectly fused to the targeting domain. In some embodiments, the effector domain is indirectly fused to the targeting domain via a peptide linker. In some embodiments, the effector domain is indirectly fused to the targeting domain via a peptide linker of sufficient length such that the effector domain and the targeting domain can simultaneous bind the respective target proteins. In some embodiments, the peptide linker comprises the amino acid sequence of any one of SEQ ID NOS: 375-384 or 402-519, or the amino acid sequence of any one of SEQ ID NOS: 375-384 or 402-519 comprising 1, 2, or 3 amino acid modifications. In some embodiments, the peptide linker comprises the amino acid sequence of any one of SEQ ID NOS: 375-384, or the amino acid sequence of any one of SEQ ID NOS: 375-384 comprising 1, 2, or 3 amino acid modifications.

[0024] In some embodiments, the effector domain is operably connected either directly or indirectly to the C terminus of the targeting domain. In some embodiments, the effector moiety is operably connected either directly or indirectly to the N terminus of the targeting domain.

[0025] In some embodiments, the targeting domain comprises a VHH of any one of claims 62-69, or a (VHH)₂ of any one of claims 70-81.

[0026] In some embodiments, the catalytic domain comprises an amino acid sequence at least 80%, 81%, 82%, 83%, 84%, 85%, 86%, 87%, 88%, 89%90%, 91%, 92%, 93%, 94%, 95%, 96%, 97%, 98%, 99%, or 100% identical to the amino acid sequence of SEQ ID NO: 286.

[0027] In some embodiments, the effector domain is indirectly fused to the targeting domain via a peptide linker of sufficient length such that the effector domain and the targeting domain can simultaneous bind the respective target proteins. In some embodiments, the peptide linker comprises the amino acid sequence of any one of SEQ ID NOS: 375-384 or 402-519, or the amino acid sequence of any one of SEQ ID NOS: 375-384 or 402-519 comprising 1, 2, or 3 amino acid modifications. In some embodiments, the peptide linker comprises the amino acid sequence of any one of SEQ ID NOS: 375-384, or the amino acid sequence of any one of SEQ ID NOS: 375-384 comprising 1, 2, or 3 amino acid modifications.

[0028] In some embodiments, the effector domain is operably connected either directly or indirectly to the C terminus of the targeting domain. In some embodiments, the effector moiety is operably connected either directly or indirectly to the N terminus of the targeting domain.

[0029] In some embodiments, the fusion protein comprises an amino acid sequence at least at least 80%, 81%, 82%, 83%, 84%, 85%, 86%, 87%, 88%, 89%90%, 91%, 92%, 93%, 94%, 95%, 96%, 97%, 98%, 99%, or 100% identical to the amino acid sequence of any one of SEQ ID NOS: 320-367.

[0030] In one aspect, provided herein are nucleic acid molecules encoding a fusion protein described herein. In some embodiments, the nucleic acid molecule is a DNA molecule. In some embodiments, the nucleic acid molecule is an RNA molecule.

[0031] In one aspect, provided herein are vectors comprising a nucleic acid molecule described herein (e.g., a nucleic acid molecule encoding a fusion protein described herein). In some embodiments, the vector is a plasmid or a viral vector.

[0032] In one aspect, provided herein are viral particles comprising a nucleic acid molecule described herein (e.g., a nucleic acid molecule encoding a fusion protein described herein).

[0033] In one aspect, provided herein are in vitro cell or population of cells comprising a fusion protein described herein, a nucleic acid molecule described herein, or a vector described herein.

[0034] In one aspect, provided herein are pharmaceutical compositions comprising a fusion protein described herein, a nucleic acid described herein, a vector described herein, or a viral particle described herein, and an excipient.

[0035] In one aspect, provided herein are methods of making a fusion protein described herein, comprising introducing into an in vitro cell or population of cells a nucleic acid molecule described herein, a vector described herein, or a viral particle described herein; culturing the cell or population of cells in a culture medium under conditions suitable for expression of the fusion protein, isolating the fusion protein from the culture medium, and optionally purifying the fusion protein.

[0036] In one aspect, provided herein are methods of treating or preventing a disease in a subject comprising administering a fusion protein described herein, a nucleic acid molecule described herein, a vector described herein, a viral particle described herein, or a pharmaceutical composition described herein, to a subject in need thereof. In some embodiments, the subject is human.

[0037] In some embodiments, the disease is associated with decreased expression of a functional version of the cytosolic protein relative to a non-diseased control. In some embodiments, the disease is associated with decreased stability of a functional version of the cytosolic protein relative to a non-diseased control. In some embodiments, the disease is associated with increased ubiquitination of the cytosolic protein relative to a non-diseased control. In some embodiments, the disease is associated with increased ubiquitination and degradation of the cytosolic protein relative to a non-diseased control. In some embodiments, disease is a genetic disease. In some embodiments, the disease is a haploinsufficiency disease.

[0038] In some embodiments, the disease is SYNGAP1 encephalopathy, CDKL5 deficiency disorder, STXBP1 encephalopathy, early infantile epileptic encephalopathy type 2, Wilson disease, early infantile epileptic encephalopathy type 4, mental retardation autosomal dominant 5, aphasia, alagille syndrome 1, epilepsy, tuberous sclerosis-2, tuberous sclerosis-1, KIF1A-associated neurological disorder, encephalopathy, Phelan-McDermid syndrome, Becker Muscular Dystrophy, RP1, retinitis pigmentosa 1, dilated cardiomyopathy 1G, DYNCIHI Syndrome, TRIO-Related intellectual disability (ID), USP9X Development Disorder, epilepsy, progressive myoclonic 1 (EPM1), or hyperphenylalaninemia BH4-deficient D (HPABH4D).

[0039] In some embodiments, the target cytosolic protein is SYNGAP1, and the disease is SYNGAP1 encephalopathy; the target cytosolic protein is SYNGAP1, and the disease is Mental retardation autosomal dominant 5; the target cytosolic protein is CDKL5, and the disease is CDKL5 deficiency disorder; the target cytosolic protein is CDKL5, and the disease is an early infantile epileptic encephalopathy; the target cytosolic protein is CDKL5, and the disease is early infantile epileptic encephalopathy type 2; the target cytosolic protein is ATP7B, and the disease is Wilson disease; the target cytosolic protein is STXBP1, and the disease is STXBP1 encephalopathy; the target cytosolic protein is STXBP1, and the disease is an early infantile epileptic encephalopathy; the target cytosolic protein is STXBP1, and the disease is early infantile epileptic encephalopathy type 4; the target cytosolic protein is GRN, and the disease is aphasia primary progressive & FTD (frontotemporal degeneration); the target cytosolic protein is JAG1, and the disease is alagille syndrome 1; the target cytosolic protein is DEPDC5, and the disease is epilepsy (e.g., familial focal, with variable foci 1); the target cytosolic protein is TSC2, and the disease is tuberous sclerosis; the target cytosolic protein is TSC2, and the disease is tuberous sclerosis type 2; the target cytosolic protein is TSC2, and the disease is tuberous sclerosis type 1; the target cytosolic protein is TSC1, and the disease is tuberous sclerosis; the target cytosolic protein is TSC1, and the disease is tuberous sclerosis type 1; the target cytosolic protein is TSC1, and the disease is tuberous sclerosis type 2; the target cytosolic protein is KIF1A, and the disease is KIF1A-associated neurological disorder; the target cytosolic protein is DNM1, and the disease is a DNM1 encephalopathy; the target cytosolic protein is DNM1, and the disease is encephalopathy; the target cytosolic protein is SHANK3, and the disease is Phelan-McDermid syndrome; the target cytosolic protein is DMD, and the disease is Becker Muscular Dystrophy; the target cytosolic protein is RP1, and the disease is retinitis pigmentosa 1; the target cytosolic protein is TTN, and the disease is dilated cardiomyopathy 1G; the target cytosolic protein is DYNC1H1, and the disease is DYNC1H1 Syndrome; the target cytosolic protein is TRIO, and the disease is TRIO-Related intellectual disability (ID); the target cytosolic protein is USP9X, and the disease is USP9X development disorder; the target cytosolic protein is CSTB, and the disease is epilepsy, progressive myoclonic 1 (EPM1); or the target cytosolic protein is PCBD1, and the disease is hyperphenylalaninemia, BH4-deficient, D (HPABH4D). In some embodiments, the target cytosolic protein is SYNGAP1, and the disease is SYNGAP1 encephalopathy.

[0040] In some embodiments, the fusion protein, nucleic acid molecule, vector, viral particle, or pharmaceutical composition is administered at a therapeutically effective dose. In some embodiments, the disease is a haploinsufficiency disease. the fusion protein, nucleic acid molecule, vector, viral particle, or pharmaceutical composition is administered systematically or locally. In some embodiments, the disease is a haploinsufficiency disease. In some embodiments the fusion protein, nucleic acid molecule, vector, viral particle, or pharmaceutical composition is administered intravenously, subcutaneously, or intramuscularly.

[0041] In one aspect, provided herein are fusion proteins described herein, polynucleotides described herein, DNA described herein, RNA described herein, vectors described herein, viral particles described herein, and pharmaceutical compositions described herein for use as a medicament.

[0042] In one aspect, provided herein are fusion proteins described herein, polynucleotides described herein, DNA described herein, RNA described herein, vectors described herein, viral particles described herein, and pharmaceutical compositions described herein for use in treating or inhibiting a genetic disorder.

[0043] In one aspect, provided herein are single variable domain antibodies (VHHs) that specifically binds SYNGAP1 comprising three complementarity determining regions: CDR1, CDR2, and CDR3, wherein the amino acid sequence of CDR1 comprises the amino acid sequence of SEQ ID NO: 290, 294, 298, 302, 306, or 310, or the amino acid sequence of SEQ ID NO: 290, 294, 298, 302, 306, or 310 comprising 1, 2, or 3 amino acid modifications; the amino acid sequence of CDR2 comprises the amino acid sequence of SEQ ID NO: 291, 295, 299, 303, 307, or 311, or the amino acid sequence of SEQ ID NO: 291, 295, 299, 303, 307, or 311 comprising 1, 2, or 3 amino acid modifications; and/or the amino acid sequence of CDR3 comprises the amino acid sequence of SEQ ID NO: 292, 296, 300, 304, 308, or 312, or the amino acid sequence of SEQ ID NO: 292, 296, 300, 304, 308, or 312 comprising 1, 2, or 3 amino acid modifications.

[0044] In some embodiments, the amino acid sequence of CDR1 comprises the amino acid sequence of SEQ ID NO: 290, or the amino acid sequence of SEQ ID NO: 290 comprising 1, 2, or 3 amino acid modifications; the amino acid sequence of CDR2 comprises the amino acid sequence of SEQ ID NO: 291, or the amino acid sequence of SEQ ID NO: 291 comprising 1, 2, or 3 amino acid modifications; and/or the amino acid sequence of CDR3 comprises the amino acid sequence of SEQ ID NO: 292, or the amino acid sequence of SEQ ID NO: 292 comprising 1, 2, or 3 amino acid modifications.

[0045] In some embodiments, the amino acid sequence of CDR1 comprises the amino acid sequence of SEQ ID NO: 294, or the amino acid sequence of SEQ ID NO: 294 comprising 1, 2, or 3 amino acid modifications; the amino acid sequence of CDR2 comprises the amino acid sequence of SEQ ID NO: 295, or the amino acid sequence of SEQ ID NO: 295 comprising 1, 2, or 3 amino acid modifications; and/or the amino acid sequence of CDR3 comprises the amino acid sequence of SEQ ID NO: 296, or the amino acid sequence of SEQ ID NO: 296 comprising 1, 2, or 3 amino acid modifications.

[0046] In some embodiments, the amino acid sequence of CDR1 comprises the amino acid sequence of SEQ ID NO: 298, or the amino acid sequence of SEQ ID NO: 298 comprising 1, 2, or 3 amino acid modifications; the amino acid sequence of CDR2 comprises the amino acid sequence of SEQ ID NO: 299, or the amino acid sequence of SEQ ID NO: 299 comprising 1, 2, or 3 amino acid modifications; and/or the amino acid sequence of CDR3 comprises the amino acid sequence of SEQ ID NO: 300, or the amino acid sequence of SEQ ID NO: 300 comprising 1, 2, or 3 amino acid modifications.

[0047] In some embodiments, the amino acid sequence of CDR1 comprises the amino acid sequence of SEQ ID NO: 302, or the amino acid sequence of SEQ ID NO: 302 comprising 1, 2, or 3 amino acid modifications; the amino acid sequence of CDR2 comprises the amino acid sequence of SEQ ID NO: 303, or the amino acid sequence of SEQ ID NO: 303 comprising 1, 2, or 3 amino acid modifications; and/or the amino acid sequence of CDR3 comprises the amino acid sequence of SEQ ID NO: 304, or the amino acid sequence of SEQ ID NO: 304 comprising 1, 2, or 3 amino acid modifications.

[0048] In some embodiments, the amino acid sequence of CDR1 comprises the amino acid sequence of SEQ ID NO: 306, or the amino acid sequence of SEQ ID NO: 306 comprising 1, 2, or 3 amino acid modifications; the amino acid sequence of CDR2 comprises the amino acid sequence of SEQ ID NO: 307, or the amino acid sequence of SEQ ID NO: 307 comprising 1, 2, or 3 amino acid modifications; and/or the amino acid sequence of CDR3 comprises the amino acid sequence of SEQ ID NO: 308, or the amino acid sequence of SEQ ID NO: 308 comprising 1, 2, or 3 amino acid modifications.

[0049] In some embodiments, the amino acid sequence of CDR1 comprises the amino acid sequence of SEQ ID NO: 310, or the amino acid sequence of SEQ ID NO: 310 comprising 1, 2, or 3 amino acid modifications; the amino acid sequence of CDR2 comprises the amino acid sequence of SEQ ID NO: 311, or the amino acid sequence of SEQ ID NO: 311 comprising 1, 2, or 3 amino acid modifications; and/or the amino acid sequence of CDR3 comprises the amino acid sequence of SEQ ID NO: 312, or the amino acid sequence of SEQ ID NO: 312 comprising 1, 2, or 3 amino acid modifications.

[0050] In some embodiments, the VHH comprises an amino acid sequence at least 90%, 91%, 92%, 93%, 94%, 95%, 96%, 97%, 98%, 99%, or 100% identical to the amino acid sequence of any one of SEQ ID NOS: 293, 297, 301, 305, 309, or 313.

[0051] In one aspect, provided herein are nucleic acid molecules encoding a VHH described herein. In some embodiments, the nucleic acid molecule is a DNA molecule. In some embodiments, the nucleic acid molecule is an RNA molecule.

[0052] In one aspect, provided herein are vectors comprising a nucleic acid molecule described herein (e.g., a nucleic acid molecule encoding a VHH described herein). In some embodiments, the vector is a plasmid or a viral vector.

[0053] In one aspect, provided herein are viral particles comprising a nucleic acid molecule described herein (e.g., a nucleic acid molecule encoding a VHH described herein).

[0054] In one aspect, provided herein are in vitro cell or population of cells comprising a VHH described herein, a nucleic acid molecule described herein (e.g., a nucleic acid molecule encoding a VHH described herein), or a vector described herein (e.g., a vector comprising a nucleic acid molecule encoding a VHH described herein).

[0055] In one aspect, provided herein are pharmaceutical compositions comprising a VHH described herein, a nucleic acid molecule described herein (e.g., a nucleic acid molecule encoding a VHH described herein), or a vector described herein (e.g., a vector comprising a nucleic acid molecule encoding a VHH described herein) or a viral particle described herein (e.g., a viral particle comprising a nucleic acid molecule encoding a VHH described herein), and an excipient.

[0056] In one aspect, provided herein are methods of making a VHH polypeptides described herein, comprising introducing into an in vitro cell or population of cells a nucleic acid molecule described herein (e.g., a nucleic acid molecule encoding a VHH described herein), or a vector described herein (e.g., a vector comprising a nucleic acid molecule encoding a VHH described herein) or a viral particle described herein (e.g., a viral particle comprising a nucleic acid molecule encoding a VHH described herein); culturing the cell or population of cells in a culture medium under conditions suitable for expression of the VHH, isolating the VHH from the culture medium, and optionally purifying the VHH.

[0057] In one aspect, provided herein are (VHH)₂s comprising a first VHH that specifically binds SYNGAP1 comprising three complementarity determining regions: CDR1, CDR2, and CDR3, wherein the amino acid sequence of CDR1 comprises the amino acid sequence of SEQ ID NO: 290, 294, 298, 302, 306, or 310, or the amino acid sequence of SEQ ID NO: 290, 294, 298, 302, 306, or 310 comprising 1, 2, or 3 amino acid modifications; the amino acid sequence of CDR2 comprises the amino acid sequence of SEQ ID NO: 291, 295, 299, 303, 307, or 311, or the amino acid sequence of SEQ ID NO: 291, 295, 299, 303, 307, or 311 comprising 1, 2, or 3 amino acid modifications; and/or the amino acid sequence of CDR3 comprises the amino acid sequence of SEQ ID NO: 292, 296, 300, 304, 308, or 312, or the amino acid sequence of SEQ ID NO: 292, 296, 300, 304, 308, or 312 comprising 1, 2, or 3 amino acid modifications; and a second VHH that specifically binds SYNGAP1 comprising three complementarity determining regions: CDR1, CDR2, and CDR3, wherein the amino acid sequence of CDR1 comprises the amino acid sequence of SEQ ID NO: 290, 294, 298, 302, 306, or 310, or the amino acid sequence of SEQ ID NO: 290, 294, 298, 302, 306, or 310 comprising 1, 2, or 3 amino acid modifications; the amino acid sequence of CDR2 comprises the amino acid sequence of SEQ ID NO: 291, 295, 299, 303, 307, or 311, or the amino acid sequence of SEQ ID NO: 291, 295, 299, 303, 307, or 311 comprising 1, 2, or 3 amino acid modifications; and/or the amino acid sequence of CDR3 comprises the amino acid sequence of SEQ ID NO: 292, 296, 300, 304, 308, or 312, or the amino acid sequence of SEQ ID NO: 292, 296, 300, 304, 308, or 312 comprising 1, 2, or 3 amino acid modifications; wherein the first VHH and the second VHH are directly or indirectly operably connected.

[0058] In some embodiments, the first VHH comprises three CDRs: CDR1, CDR2, and CDR3, wherein the amino acid sequence of CDR1 comprises the amino acid sequence of SEQ ID NO: 290, or the amino acid sequence of SEQ ID NO: 290 comprising 1, 2, or 3 amino acid modifications; the amino acid sequence of CDR2 comprises the amino acid sequence of SEQ ID NO: 291, or the amino acid sequence of SEQ ID NO: 291 comprising 1, 2, or 3 amino acid modifications; and/or the amino acid sequence of CDR3 comprises the amino acid sequence of SEQ ID NO: 292, or the amino acid sequence of SEQ ID NO: 292 comprising 1, 2, or 3 amino acid modifications; and the second VHH comprises three CDRs: CDR1, CDR2, and CDR3, wherein the amino acid sequence of CDR1 comprises the amino acid sequence of SEQ ID NO: 290, or the amino acid sequence of SEQ ID NO: 290 comprising 1, 2, or 3 amino acid modifications; the amino acid sequence of CDR2 comprises the amino acid sequence of SEQ ID NO: 291, or the amino acid sequence of SEQ ID NO: 291 comprising 1, 2, or 3 amino acid modifications; and/or the amino acid sequence of CDR3 comprises the amino acid sequence of SEQ ID NO: 292, or the amino acid sequence of SEQ ID NO: 292 comprising 1, 2, or 3 amino acid modifications.

[0059] In some embodiments, the first VHH comprises three CDRs: CDR1, CDR2, and CDR3, wherein the amino acid sequence of CDR1 comprises the amino acid sequence of SEQ ID NO: 294, or the amino acid sequence of SEQ ID NO: 294 comprising 1, 2, or 3 amino acid modifications; the amino acid sequence of CDR2 comprises the amino acid sequence of SEQ ID NO: 295, or the amino acid sequence of SEQ ID NO: 295 comprising 1, 2, or 3 amino acid modifications; and/or the amino acid sequence of CDR3 comprises the amino acid sequence of SEQ ID NO: 296, or the amino acid sequence of SEQ ID NO: 296 comprising 1, 2, or 3 amino acid modifications; and the second VHH comprises three CDRs: CDR1, CDR2, and CDR3, wherein the amino acid sequence of CDR1 comprises the amino acid sequence of SEQ ID NO: 294, or the amino acid sequence of SEQ ID NO: 294 comprising 1, 2, or 3 amino acid modifications; the amino acid sequence of CDR2 comprises the amino acid sequence of SEQ ID NO: 295, or the amino acid sequence of SEQ ID NO: 295 comprising 1, 2, or 3 amino acid modifications; and/or the amino acid sequence of CDR3 comprises the amino acid sequence of SEQ ID NO: 296, or the amino acid sequence of SEQ ID NO: 296 comprising 1, 2, or 3 amino acid modifications.

[0060] In some embodiments, the first VHH comprises three CDRs: CDR1, CDR2, and CDR3, wherein the amino acid sequence of CDR1 comprises the amino acid sequence of SEQ ID NO: 298, or the amino acid sequence of SEQ ID NO: 298 comprising 1, 2, or 3 amino acid modifications; the amino acid sequence of CDR2 comprises the amino acid sequence of SEQ ID NO: 299, or the amino acid sequence of SEQ ID NO: 299 comprising 1, 2, or 3 amino acid modifications; and/or the amino acid sequence of CDR3 comprises the amino acid sequence of SEQ ID NO: 300, or the amino acid sequence of SEQ ID NO: 300 comprising 1, 2, or 3 amino acid modifications; and the second VHH comprises three CDRs: CDR1, CDR2, and CDR3, wherein the amino acid sequence of CDR1 comprises the amino acid sequence of SEQ ID NO: 298, or the amino acid sequence of SEQ ID NO: 298 comprising 1, 2, or 3 amino acid modifications; the amino acid sequence of CDR2 comprises the amino acid sequence of SEQ ID NO: 299, or the amino acid sequence of SEQ ID NO: 299 comprising 1, 2, or 3 amino acid modifications; and/or the amino acid sequence of CDR3 comprises the amino acid sequence of SEQ ID NO: 300, or the amino acid sequence of SEQ ID NO: 300 comprising 1, 2, or 3 amino acid modifications.

[0061] In some embodiments, the first VHH comprises three CDRs: CDR1, CDR2, and CDR3, wherein the amino acid sequence of CDR1 comprises the amino acid sequence of SEQ ID NO: 302, or the amino acid sequence of SEQ ID NO: 302 comprising 1, 2, or 3 amino acid modifications; the amino acid sequence of CDR2 comprises the amino acid sequence of SEQ ID NO: 303, or the amino acid sequence of SEQ ID NO: 303 comprising 1, 2, or 3 amino acid modifications; and/or the amino acid sequence of CDR3 comprises the amino acid sequence of SEQ ID NO: 304, or the amino acid sequence of SEQ ID NO: 304 comprising 1, 2, or 3 amino acid modifications; and the second VHH comprises three CDRs: CDR1, CDR2, and CDR3, wherein the amino acid sequence of CDR1 comprises the amino acid sequence of SEQ ID NO: 302, or the amino acid sequence of SEQ ID NO: 302 comprising 1, 2, or 3 amino acid modifications; the amino acid sequence of CDR2 comprises the amino acid sequence of SEQ ID NO: 303, or the amino acid sequence of SEQ ID NO: 303 comprising 1, 2, or 3 amino acid modifications; and/or the amino acid sequence of CDR3 comprises the amino acid sequence of SEQ ID NO: 304, or the amino acid sequence of SEQ ID NO: 304 comprising 1, 2, or 3 amino acid modifications.

[0062] In some embodiments, the first VHH comprises three CDRs: CDR1, CDR2, and CDR3, wherein the amino acid sequence of CDR1 comprises the amino acid sequence of SEQ ID NO: 306, or the amino acid sequence of SEQ ID NO: 306 comprising 1, 2, or 3 amino acid modifications; the amino acid sequence of CDR2 comprises the amino acid sequence of SEQ ID NO: 307, or the amino acid sequence of SEQ ID NO: 307 comprising 1, 2, or 3 amino acid modifications; and/or the amino acid sequence of CDR3 comprises the amino acid sequence of SEQ ID NO: 308, or the amino acid sequence of SEQ ID NO: 308 comprising 1, 2, or 3 amino acid modifications; and the second VHH comprises three CDRs: CDR1, CDR2, and CDR3, wherein the amino acid sequence of CDR1 comprises the amino acid sequence of SEQ ID NO: 306, or the amino acid sequence of SEQ ID NO: 306 comprising 1, 2, or 3 amino acid modifications; the amino acid sequence of CDR2 comprises the amino acid sequence of SEQ ID NO: 307, or the amino acid sequence of SEQ ID NO: 307 comprising 1, 2, or 3 amino acid modifications; and/or the amino acid sequence of CDR3 comprises the amino acid sequence of SEQ ID NO: 308, or the amino acid sequence of SEQ ID NO: 308 comprising 1, 2, or 3 amino acid modifications.

[0063] In some embodiments, the first VHH comprises three CDRs: CDR1, CDR2, and CDR3, wherein the amino acid sequence of CDR1 comprises the amino acid sequence of SEQ ID NO: 310, or the amino acid sequence of SEQ ID NO: 310 comprising 1, 2, or 3 amino acid modifications; the amino acid sequence of CDR2 comprises the amino acid sequence of SEQ ID NO: 311, or the amino acid sequence of SEQ ID NO: 311 comprising 1, 2, or 3 amino acid modifications; and/or the amino acid sequence of CDR3 comprises the amino acid sequence of SEQ ID NO: 312, or the amino acid sequence of SEQ ID NO: 312 comprising 1, 2, or 3 amino acid modifications; and the second VHH comprises three CDRs: CDR1, CDR2, and CDR3, wherein the amino acid sequence of CDR1 comprises the amino acid sequence of SEQ ID NO: 310, or the amino acid sequence of SEQ ID NO: 310 comprising 1, 2, or 3 amino acid modifications; the amino acid sequence of CDR2 comprises the amino acid sequence of SEQ ID NO: 311, or the amino acid sequence of SEQ ID NO: 311 comprising 1, 2, or 3 amino acid modifications; and/or the amino acid sequence of CDR3 comprises the amino acid sequence of SEQ ID NO: 312, or the amino acid sequence of SEQ ID NO: 312 comprising 1, 2, or 3 amino acid modifications.

[0064] In some embodiments, the first VHH comprises an amino acid sequence at least 90%, 91%, 92%, 93%, 94%, 95%, 96%, 97%, 98%, 99%, or 100% identical to the amino acid sequence of any one of SEQ ID NOS: 293, 297, 301, 305, 309, or 313; and the second VHH comprises an amino acid sequence at least 90%, 91%, 92%, 93%, 94%, 95%, 96%, 97%, 98%, 99%, or 100% identical to the amino acid sequence of any one of SEQ ID NOS: 293, 297, 301, 305, 309, or 313.

[0065] In some embodiments, the first VHH comprises an amino acid sequence at least 90%, 91%, 92%, 93%, 94%, 95%, 96%, 97%, 98%, 99%, or 100% identical to the amino acid sequence of any one of SEQ ID NOS: 293; and the second VHH comprises an amino acid sequence at least 90%, 91%, 92%, 93%, 94%, 95%, 96%, 97%, 98%, 99%, or 100% identical to the amino acid sequence of any one of SEQ ID NOS: 293; the first VHH comprises an amino acid sequence at least 90%, 91%, 92%, 93%, 94%, 95%, 96%, 97%, 98%, 99%, or 100% identical to the amino acid sequence of any one of SEQ ID NOS: 297; and the second VHH comprises an amino acid sequence at least 90%, 91%, 92%, 93%, 94%, 95%, 96%, 97%, 98%, 99%, or 100% identical to the amino acid sequence of any one of SEQ ID NOS: 297; the first VHH comprises an amino acid sequence at least 90%, 91%, 92%, 93%, 94%, 95%, 96%, 97%, 98%, 99%, or 100% identical to the amino acid sequence of any one of SEQ ID NOS: 301; and the second VHH comprises an amino acid sequence at least 90%, 91%, 92%, 93%, 94%, 95%, 96%, 97%, 98%, 99%, or 100% identical to the amino acid sequence of any one of SEQ ID NOS: 301; the first VHH comprises an amino acid sequence at least 90%, 91%, 92%, 93%, 94%, 95%, 96%, 97%, 98%, 99%, or 100% identical to the amino acid sequence of any one of SEQ ID NOS: 305; and the second VHH comprises an amino acid sequence at least 90%, 91%, 92%, 93%, 94%, 95%, 96%, 97%, 98%, 99%, or 100% identical to the amino acid sequence of any one of SEQ ID NOS: 305; the first VHH comprises an amino acid sequence at least 90%, 91%, 92%, 93%, 94%, 95%, 96%, 97%, 98%, 99%, or 100% identical to the amino acid sequence of any one of SEQ ID NOS: 309; and the second VHH comprises an amino acid sequence at least 90%, 91%, 92%, 93%, 94%, 95%, 96%, 97%, 98%, 99%, or 100% identical to the amino acid sequence of any one of SEQ ID NOS: 309; or the first VHH comprises an amino acid sequence at least 90%, 91%, 92%, 93%, 94%, 95%, 96%, 97%, 98%, 99%, or 100% identical to the amino acid sequence of any one of SEQ ID NOS: 313; and the second VHH comprises an amino acid sequence at least 90%, 91%, 92%, 93%, 94%, 95%, 96%, 97%, 98%, 99%, or 100% identical to the amino acid sequence of any one of SEQ ID NOS: 313.

[0066] In some embodiments, the first VHH is operably connected to the second VHH via a peptide linker.

[0067] In some embodiments, the peptide linker comprises the amino acid sequence of any one of SEQ ID NOS: 375-384 or 402-519, or the amino acid sequence of any one of SEQ ID NOS: 375-384 or 402-519 comprising 1, 2, or 3 amino acid modifications.

[0068] In one aspect, provided herein are nucleic acid molecules encoding a (VHH)₂ described herein. In some embodiments, the nucleic acid molecule is a DNA molecule. In some embodiments, the nucleic acid molecule is an RNA molecule.

[0069] In one aspect, provided herein are vectors comprising a nucleic acid molecule described herein (e.g., a nucleic acid molecule encoding a (VHH)₂ described herein). In some embodiments, the vector is a plasmid or a viral vector.

[0070] In one aspect, provided herein are viral particles comprising a nucleic acid molecule described herein (e.g., a nucleic acid molecule encoding a (VHH)₂ described herein).

[0071] In one aspect, provided herein are in vitro cell or population of cells comprising a (VHH)₂ described herein, a nucleic acid molecule described herein (e.g., a nucleic acid molecule encoding a (VHH)₂ described herein), or a vector described herein (e.g., a vector comprising a nucleic acid molecule encoding a (VHH)₂ described herein).

[0072] In one aspect, provided herein are pharmaceutical compositions comprising a (VHH)₂ described herein, a nucleic acid molecule described herein (e.g., a nucleic acid molecule encoding a (VHH)₂ described herein), or a vector described herein (e.g., a vector comprising a nucleic acid molecule encoding a (VHH)₂ described herein) or a viral particle described herein (e.g., a viral particle comprising a nucleic acid molecule encoding a (VHH)₂ described herein), and an excipient.

[0073] In one aspect, provided herein are methods of making a (VHH)₂ polypeptides described herein, comprising introducing into an in vitro cell or population of cells a nucleic acid molecule described herein (e.g., a nucleic acid molecule encoding a (VHH)₂ described herein), or a vector described herein (e.g., a vector comprising a nucleic acid molecule encoding a (VHH)₂ described herein) or a viral particle described herein (e.g., a viral particle comprising a nucleic acid molecule encoding a (VHH)₂ described herein); culturing the cell or population of cells in a culture medium under conditions suitable for expression of the (VHH)₂, isolating the (VHH)₂ from the culture medium, and optionally purifying the (VHH)₂.

[0074] In some embodiments, the peptide linker comprises the amino acid sequence of any one of SEQ ID NOS: 375-384, or the amino acid sequence of any one of SEQ ID NOS: 375-384 comprising 1, 2, or 3 amino acid modifications.

[0075] In one aspect, provided herein, are fusion proteins comprising: (a) an effector domain comprising a catalytic domain of a deubiquitinase, or a functional fragment or functional variant thereof; and (b) a targeting domain comprising a targeting moiety that specifically binds a cytosolic protein.

[0076] In some embodiments, the deubiquitinase is a cysteine protease or a metalloprotease.

[0077] In some embodiments, the deubiquitinase is a cysteine protease. In some embodiments, the cysteine protease is a ubiquitin-specific protease (USP), a ubiquitin C-terminal hydrolase (UCH), a Machado-Josephin domain protease (MJD), an ovarian tumour protease (OTU), a MINDY protease, or a ZUFSP protease.

[0078] In some embodiments, the cysteine protease is a USP. In some embodiments, the USP is selected from the group consisting of USP1, USP2, USP3, USP4, USP5, USP6, USP7, USP8, USP9X, USP9Y, USP10, USP11, USP12, USP13, USP14, USP15, USP16, USP17, USP17L2, USP17L3, USP17L4, USP17L5, USP17L7, USP17L8, USP18, USP19, USP20, USP21, USP22, USP23, USP24, USP25, USP26, USP27X, USP28, USP29, USP30, USP31, USP32, USP33, USP34, USP35, USP36, USP37, USP38, USP39, USP40, USP41, USP42, USP43, USP44, USP45, and USP46.

[0079] In some embodiments, the cysteine protease is a UCH. In some embodiments, the UCH is selected from the group consisting of BAP1, UCHL1, UCHL3, and UCHL5.

[0080] In some embodiments, the cysteine protease is a MJD. In some embodiments, the MJD is selected from the group consisting of ATXN3 and ATXN3L.

[0081] In some embodiments, the cysteine protease is a OTU. In some embodiments, the OTU is selected from the group consisting of OTUB1 and OTUB2.

[0082] In some embodiments, the cysteine protease is a MINDY. In some embodiments, the MINDY is selected from the group consisting of MINDY1, MINDY2, MINDY3, and MINDY4.

[0083] In some embodiments, the cysteine protease is a ZUFSP. In some embodiments, the ZUFSP is ZUP1.

[0084] In some embodiments, the deubiquitinase is a metalloprotease. In some embodiments, the metalloprotease is a Jab1/Mov34/Mpr1 Pad1 N-terminal+(MPN+) (JAMM) domain protease.

[0085] In some embodiments, the deubiquitinase comprises an amino acid sequence at least 80%, 81%, 82%, 83%, 84%, 85%, 86%, 87%, 88%, 89%, 90%, 91%, 92%, 93%, 94%, 95%, 96%, 97%, 98%, 99%, or 100% identical to any one of SEQ ID NOS: 1-112.

[0086] In some embodiments, the catalytic domain comprises a catalytic domain derived from a deubiquitinase at least 80%, 81%, 82%, 83%, 84%, 85%, 86%, 87%, 88%, 89%, 90%, 91%, 92%, 93%, 94%, 95%, 96%, 97%, 98%, 99%, or 100% identical to any one of SEQ ID NOS: 1-112.

[0087] In some embodiments, the catalytic domain comprises an amino acid sequence at least 80%, 81%, 82%, 83%, 84%, 85%, 86%, 87%, 88%, 89%, 90%, 91%, 92%, 93%, 94%, 95%, 96%, 97%, 98%, 99%, or 100% identical to any one of SEQ ID NOS: 113-220.

[0088] In some embodiments, the moiety that specifically binds a cytosolic protein comprises an antibody, or functional fragment or functional variant thereof. In some embodiments, the antibody, or functional fragment or functional variant thereof, comprises a full-length antibody, a single chain variable fragment (scFv), a scFv2, a scFv-Fc, a Fab, a Fab′, a F(ab′)2, a F(v), or a VHH. In some embodiments, the antibody, or functional fragment or functional variant thereof, comprises a VHH.

[0089] In some embodiments, the cytosolic protein is a transcription factor.

[0090] In some embodiments, the cytosolic protein is selected from the group consisting of cyclin-dependent kinase-like 5 (CDKL5), copper-transporting ATPase 2 (ATP7B), syntaxin-binding protein 1 (STXBP1), Ras/Rap GTPase-activating protein (SYNGAP1), progranulin (GRN), protein jagged-1 (JAG1), GATOR complex protein DEPDC5 (DEPDC5), tuberin (TSC2), hamartin (TSC1), kinesin-like protein KIF1A (KIF1A), dynamin-1 (DNM1), SH3 and multiple ankyrin repeat domains protein 3 (SHANK3), dystrophin (DMD), oxygen-regulated protein 1 (RP1), titin (TTN), cytoplasmic dynein 1 heavy chain 1 (DYNCIHI), TRIO and F-actin-binding protein (TRIO), and probable ubiquitin carboxyl-terminal hydrolase FAF-X (USP9X)

[0091] In some embodiments, the cytosolic protein comprises an amino acid sequence at least 90%, 91%, 92%, 93%, 94%, 95%, 96%, 97%, 98%, 99%, or 100% identical to any one of SEQ ID NOS: 221-328.

[0092] In some embodiments, the effector domain is directly fused to the targeting domain. In some embodiments, the effector domain is indirectly fused to the targeting domain. In some embodiments, the effector domain is indirectly fused to the targeting domain via a peptide linker. In some embodiments, the effector domain is indirectly fused to the targeting domain via a peptide linker of sufficient length such that the effector domain and the targeting domain can simultaneous bind the respective target proteins.

[0093] In some embodiments, the effector domain is fused to the C terminus of the targeting domain. In some embodiments, the effector moiety is fused to the N terminus of the targeting domain.

[0094] In one aspect, provided herein are nucleic acid molecules encoding the fusion protein described herein. In some embodiments, the nucleic acid molecule is a DNA molecule. In some embodiments, the nucleic acid molecule is an RNA molecule.

[0095] In one aspect, provided herein are vectors comprising a nucleic acid molecule described herein. In some embodiments, the vector is a plasmid or a viral vector.

[0096] In one aspect, provided herein are viral particles comprising a nucleic acid described herein.

[0097] In one aspect, described herein is an in vitro cell or population of cells comprising a fusion protein described herein, a nucleic acid molecule described herein, or a vector described herein.

[0098] In one aspect, provided herein are pharmaceutical compositions comprising a fusion protein described herein, a nucleic acid molecule described herein, a vector described herein, or a viral particle described herein, and an excipient.

[0099] In one aspect, provided herein are methods of making a fusion protein described herein, comprising (a) introducing into an in vitro cell or population of cells a nucleic acid described herein, a vector described herein, or a viral particle described herein; (b) culturing the cell or population of cells in a culture medium under conditions suitable for expression of the fusion protein, (c) isolating the fusion protein from the culture medium, and (d) optionally purifying the fusion protein.

[0100] In one aspect, provided herein are methods of treating a disease in a subject comprising administering a fusion protein described herein, a nucleic acid described herein, a vector described herein, or a viral particle described herein, or a pharmaceutical composition described herein, to a subject in need thereof.

[0101] In some embodiments, the subject is human.

[0102] In some embodiments, the disease is associated with decreased expression of a functional version of the cytosolic protein relative to a non-diseased control.

[0103] In some embodiments, the disease is associated with decreased stability of a functional version of the cytosolic protein relative to a non-diseased control.

[0104] In some embodiments, the disease is associated with increased ubiquitination and degradation of the cytosolic protein relative to a non-diseased control.

[0105] In some embodiments, the disease is a genetic disease.

[0106] In some embodiments, the disease is a SYNGAP1 encephalopathy, CDKL5 deficiency disorder, STXBP1 encephalopathy early, infantile epileptic encephalopathy type 2, Wilson disease, early infantile epileptic encephalopathy type 4, mental retardation autosomal dominant 5, aphasia (e.g., Aphasia, primary progressive & FTD), alagille syndrome 1, epilepsy (e.g., Familial Focal Epilepsy), tuberous sclerosis-2, tuberous sclerosis-1, KIF1A-associated neurological disorder, encephalopathy, Phelan-McDermid syndrome, Becker Muscular Dystrophy, RP1, retinitis pigmentosa 1, dilated cardiomyopathy 1G, DYNC1H1 Syndrome, TRIO-Related intellectual disability (ID), and USP9X Development Disorder.

[0107] The method of any one of claims 43-48, wherein the disease is early infantile epileptic encephalopathy type 2, Wilson disease, early infantile epileptic encephalopathy type 4, mental retardation autosomal dominant 5, aphasia primary progressive & FTD (frontotemporal degeneration), alagille syndrome 1, epilepsy familial focal with variable foci 1, tuberous sclerosis-2, tuberous sclerosis-1, KIF1A-associated neurological disorder, encephalopathy, Phelan-McDermid syndrome, Becker Muscular Dystrophy, RP1, retinitis pigmentosa 1, dilated cardiomyopathy 1G, DYNC1H1 Syndrome, TRIO-Related intellectual disability (ID), and USP9X Development Disorder.

[0108] In some embodiments, the disease is a haploinsufficiency disease.

[0109] In some embodiments, the fusion protein is administered at a therapeutically effective dose.

[0110] In some embodiments, the fusion protein is administered systematically or locally.

[0111] In some embodiments, the fusion protein is administered intravenously, subcutaneously, or intramuscularly.

### 4. BRIEF DESCRIPTION OF THE FIGURES

[0112] FIGS. 1A-1D provides a schematic representation of exemplary fusion proteins described herein. FIG. 1A is a schematic of an engineered deubiquitinase comprising from N′ to C′ terminus a VHH that specifically binds a cytosolic target protein and the catalytic domain of a deubiquitinase. In this specific embodiment, the C-terminus of the VHH is directly connected to the N-terminus of the catalytic domain of the deubiquitinase. FIG. 1B is a schematic of an engineered deubiquitinase comprising from N′ to C′ terminus the catalytic domain of a deubiquitinase that specifically binds a cytosolic target protein and a VHH that specifically binds a cytosolic target protein. In this specific embodiment, the C-terminus of the catalytic domain of the deubiquitinase is directly connected to the N-terminus of the VHH. FIG. 1C is a schematic of an engineered deubiquitinase comprising from N′ to C′ terminus a VHH that specifically binds a cytosolic target protein and the catalytic domain of a deubiquitinase. In this specific embodiment, the C-terminus of the VHH is indirectly connected to the N-terminus of the catalytic domain of the deubiquitinase through a peptide linker. FIG. 1D is a schematic of an engineered deubiquitinase comprising from N′ to C′ terminus the catalytic domain of a deubiquitinase that specifically binds a cytosolic target protein and a VHH that specifically binds a cytosolic target protein. In this specific embodiment, the C-terminus of the catalytic domain of the deubiquitinase is indirectly connected to the N-terminus of the VHH through a peptide linker.

[0113] FIG. 2 is a schematic representation of the assay utilized in Example 3, to screen the effect of targeted deubiquitination of different cytosolic proteins on target protein expression.

[0114] FIG. 3. is a bar graph depicting the fold change in SHANK3 expression relative to control (as indicated).

[0115] FIG. 4. is a bar graph depicting the fold change in SYNGAP1 protein expression relative to control (as indicated).

[0116] FIG. 5 is a bar graph depicting the fold change in PYDC2 protein expression relative to control (deubiquitinase without the nanobody targeting the alfa-tag).

[0117] FIG. 6 is a bar graph depicting the fold change in CSTB protein expression relative to control (deubiquitinase without the nanobody targeting the alfa-tag).

[0118] FIG. 7 is a bar graph depicting the fold change in PCBD1 protein expression relative to control (deubiquitinase without the nanobody targeting the alfa-tag).

[0119] FIG. 8 is an image of a reduced SDS-PAGE gel stained with Coomassie blue. Two g of purified His-SynGAP-EC [1186-1277] obtained from E. coli was loaded in the right lane. The left lane labeled “MW” was loaded with a molecular weight marker. The arrow indicates the purified His-SynGAP-EC [1186-1277] protein with a molecular weight of 15.75 kDA.

[0120] FIG. 9 is a bar graph showing the fold change in SYNGAP1 expression relative to control.

### 5. DETAILED DESCRIPTION

### 5.1 Overview

[0121] Ubiquitination is the process by which ubiquitin ligases mediate the addition of ubiquitin, a 76 amino acid regulatory protein, to a substrate protein. Ubiquitination generally starts by the attachment of a single ubiquitin molecule to a lysine amino acid residue of the substrate protein. Mevissen T. et al. Mechanisms of Deubiquitinase Specificity and Regulation Annual Review of Biochemistry 86:1, 159-192 (2017), the entire contents of which is incorporated by reference herein. These monoubiquitination events are abundant and serve various functions. Ubiquitin itself contains seven lysine residues, all of which can be ubiquitinated resulting in polyubiquitinated proteins. Komander, D. et al. Breaking the chains: structure and function of the deubiquitinases. Nat Rev Mol Cell Biol 10, 550-563 (2009), the entire contents of which is incorporated by reference herein. Mono and polyubiquitination can have multiple effects on the substrate protein, including marking the substrate protein for degradation via the proteasome, altering the protein's cellular location, altering the protein's activity, and/or promoting or preventing normal protein interactions. See e.g., Hershko A. et al. The ubiquitin system. Annu Rev Biochem. 67:425-79 (1998); Nandi D, et al. The ubiquitin-proteasome system. J Biosci. March; 31(1):137-55 (2006), the entire contents of each of which is incorporated by reference herein. The effects of ubiquitination can be reversed or prevented by removing the ubiquitin protein(s) from the substrate protein. The removal of ubiquitin from a substrate protein is mediated by deubiquitinase (DUB) proteins. Id.

[0122] Numerous genetic diseases are associated with or caused by a decrease in the level of expression of a functional cytosolic protein or the stability of the cytosolic protein. For example, haploinsufficiency genetic diseases are caused by the presence a single copy of a wild-type allele in heterozygous combination with a loss of function variant allele, wherein the level of functional protein expressed is insufficient to produce the standard phenotype. See e.g., Johnson, A. et al, Causes and effects of haploinsufficiency. Biol Rev, 94: 1774-1785 (2019), the entire contents of which is incorporated by reference herein. Haploinsufficiency can arise from a de novo or inherited loss-of-function mutation in the variant allele, such that it produces little or no functional protein. Other genetic disorders result from the ubiquitination and subsequent degradation of variant but functional proteins, resulting in a decrease in expression of the functional protein.

[0123] The present disclosure provides, inter alia, novel fusion proteins that comprise the catalytic domain (or functional fragment thereof) of a deubiquitinase and a targeting moiety, such as a VHH, that specifically binds to a target cytosolic protein. In some embodiments, decreased expression of a functional version of the target cytosolic protein or decreased stability of a functional version of the target cytosolic protein is associated with a disease phenotype. As such, the fusion proteins described herein are particularly useful in the treatment of genetic diseases characterized by a decrease in the level of expression of a functional target cytosolic protein or the stability of the target cytosolic protein. Upon expression of the fusion protein by host cells, the catalytic domain of the deubiquitinase will be specifically targeted to the target cytosolic protein and deubiquitinated, resulting in increased expression of the target cytosolic protein, e.g., to a level sufficient to alleviate the disease phenotype.

### 5.2 Definitions

[0124] The section headings used herein are for organizational purposes only and are not to be construed as limiting the subject matter described.

[0125] Unless defined otherwise, all technical and scientific terms used herein have the same meaning as commonly understood by one of ordinary skill in the art to which this disclosure is related. For example, the Concise Dictionary of Biomedicine and Molecular Biology, Juo, Pei-Show, 2nd ed., 2002, CRC Press; The Dictionary of Cell and Molecular Biology, 3rd ed., 1999, Academic Press; and the Oxford Dictionary Of Biochemistry And Molecular Biology, Revised, 2000, Oxford University Press, provide one of skill with a general dictionary of many of the terms used in this disclosure.

[0126] It is to be understood that the foregoing general description and the following detailed description are exemplary and explanatory only and are not restrictive of any subject matter claimed. In this application, the use of the singular includes the plural unless specifically stated otherwise.

[0127] It must be noted that, as used in the specification and the appended claims, the singular forms “a,” “an,” and “the” include plural referents unless the context clearly dictates otherwise. Furthermore, use of the term “including” as well as other forms, such as “include,” “includes,” and “included,” is not limiting.

[0128] It is understood that wherever aspects are described herein with the language “comprising,” otherwise analogous aspects described in terms of “consisting of” and/or “consisting essentially of” are also provided.

[0129] The term “and/or” where used herein is to be taken as specific disclosure of each of the two specified features or components with or without the other. Thus, the term “and/or” as used in a phrase such as “A and/or B” herein is intended to include “A and B,” “A or B,” “A” (alone), and “B” (alone). Likewise, the term “and/or” as used in a phrase such as “A, B, and/or C” is intended to encompass each of the following aspects: A, B, and C; A, B, or C; A or C; A or B; B or C; A and C; A and B; B and C; A (alone); B (alone); and C (alone).

[0130] Units, prefixes, and symbols are denoted in their Système International de Unites (SI) accepted form. Numeric ranges are inclusive of the numbers defining the range. The headings provided herein are not limitations of the various aspects of the disclosure, which can be had by reference to the specification as a whole. Accordingly, the terms defined immediately below are more fully defined by reference to the specification in its entirety.

[0131] As described herein, any concentration range, percentage range, ratio range or integer range is to be understood to include the value of any integer within the recited range and, when appropriate, fractions thereof (such as one tenth and one hundredth of an integer), unless otherwise indicated.

[0132] The terms “about” or “comprising essentially of” refer to a value or composition that is within an acceptable error range for the particular value or composition as determined by one of ordinary skill in the art, which will depend in part on how the value or composition is measured or determined, i.e., the limitations of the measurement system. For example, “about” or “comprising essentially of” can mean within 1 or more than 1 standard deviation per the practice in the art. Alternatively, “about” or “comprising essentially of” can mean a range of up to 20%. Furthermore, particularly with respect to biological systems or processes, the terms can mean up to an order of magnitude or up to 5-fold of a value. When particular values or compositions are provided in the application and claims, unless otherwise stated, the meaning of “about” or “comprising essentially of” should be assumed to be within an acceptable error range for that particular value or composition.

[0133] As used herein, the term “catalytic domain” in reference to a deubiquitinase refers to an amino acid sequence, or a variant thereof, of a deubiquitinase that is capable of mediating deubiquitination of a target protein. The catalytic domain may comprise a naturally occurring amino acid sequence of a deubiquitinase or it may comprise a variant amino acid sequence of a naturally occurring deubiquitinase. The catalytic domain may comprise the minimum amino acid sequence of a deubiquitinase to mediate deubiquitination of a target protein. The catalytic domain may comprise more than the minimum amino acid sequence of a deubiquitinase to mediate deubiquitination of a target protein.

[0134] The terms “polynucleotide” and “nucleic acid sequence” are used interchangeably herein and refer to a polymer of DNA or RNA. The polynucleotide sequence can be single-stranded or double-stranded; contain natural, non-natural, or altered nucleotides; and contain a natural, non-natural, or altered internucleotide linkage, such as a phosphoroamidate linkage or a phosphorothioate linkage, instead of the phosphodiester found between the nucleotides of an unmodified polynucleotide sequence. Polynucleotide sequences include, but are not limited to, all polynucleotide sequences which are obtained by any means available in the art, including, without limitation, recombinant means, e.g., the cloning of polynucleotide sequences from a recombinant library or a cell genome, using ordinary cloning technology and polymerase chain reaction, and the like, and by synthetic means.

[0135] The terms “amino acid sequence” and “polypeptide” are used interchangeably herein and refer to a polymer of amino acids connected by one or more peptide bonds.

[0136] The term “functional variant” as used herein in reference to a protein or polypeptide refers to a protein that comprises at least one amino acid modification (e.g., a substitution, deletion, addition) compared to the amino acid sequence of a reference protein, that retains at least one particular function. In some embodiments, the reference protein is a wild type protein. For example, a functional variant of an IL-2 protein can refer to an IL-2 protein comprising an amino acid substitution as compared to a wild type IL-2 protein that retains the ability to bind the intermediate affinity IL-2 receptor but abrogates the ability of the protein to bind the high affinity IL-2 receptor. Not all functions of the reference wild type protein need be retained by the functional variant of the protein. In some instances, one or more functions are selectively reduced or eliminated.

[0137] The term “functional fragment” as used herein in reference to a protein or polypeptide refers to a fragment of a reference protein that retains at least one particular function. For example, a functional fragment of an anti-HER2 antibody can refer to a fragment of the anti-HER2 antibody that retains the ability to specifically bind the HER2 antigen. Not all functions of the reference protein need be retained by a functional fragment of the protein. In some instances, one or more functions are selectively reduced or eliminated.

[0138] As used herein, the term “modification,” with reference to a polynucleotide sequence, refers to a polynucleotide sequence that comprises at least one substitution, alteration, inversion, addition, or deletion of nucleotide compared to a reference polynucleotide sequence. Modifications can include non-naturally nucleotides. As used herein, the term “modification,” with reference to an amino acid sequence refers to an amino acid sequence that comprises at least one substitution, alteration, inversion, addition, or deletion of an amino acid residue compared to a reference amino acid sequence. Modifications can include the inclusion of non-naturally occurring amino acid residues.

[0139] As used herein, the term “derived from” with reference to an amino acid sequence refers to an amino acid sequence that has at least 80% sequence identity to a reference naturally occurring amino acid sequence. For example, a catalytic domain derived from a naturally occurring deubiquitinase means that the catalytic domain has an amino acid sequence with at least 80% sequence identity to the sequence of the deubiquitinase catalytic domain from which it is derived. The term “derived from” as used herein does not denote any specific process or method for obtaining the amino acid sequence. For example, the amino acid sequence can be chemically or recombinantly synthesized.

[0140] The term “fusion protein” and grammatical equivalents as used herein refers to a protein that comprises an amino acid sequence derived from at least two separate proteins. The amino acid sequence of the at least two separate proteins can be directly connected through a peptide bond; or can be operably connected through an amino acid linker. Therefore, the term fusion protein encompasses embodiments, wherein the amino acid sequence of e.g., Protein A is directly connected to the amino acid sequence of Protein B through a peptide bond (Protein A—Protein B), and embodiments, wherein the amino acid sequence of e.g., Protein A is operably connected to the amino acid sequence of Protein B through an amino acid linker (Protein A—linker—Protein B).

[0141] The term “fuse” and grammatical equivalents thereof as used herein refers to the operable connection of an amino acid sequence derived from one protein to the amino acid sequence derived from different protein. The term fuse encompasses both a direct connection of the two amino acid sequences through a peptide bond, and the indirect connection through an amino acid linker.

[0142] An “isolated antibody” refers to an antibody that is substantially free of other antibodies having different antigenic specificities (e.g., an isolated antibody that binds specifically to HER2 is substantially free of antibodies that bind specifically to antigens other than HER2). An isolated antibody that binds specifically to HER2 may, however, cross-react with other antigens, such as HER2 molecules from different species. Moreover, an isolated antibody may be substantially free of other cellular material and/or chemicals. By comparison, an “isolated” nucleic acid refers to a nucleic acid composition of matter that is markedly different, i.e., has a distinctive chemical identity, nature and utility, from nucleic acids as they exist in nature. For example, an isolated DNA, unlike native DNA, is a freestanding portion of a native DNA and not an integral part of a larger structural complex, the chromosome, found in nature. Further, an isolated DNA, unlike native DNA, can be used as a PCR primer or a hybridization probe for, among other things, measuring gene expression and detecting biomarker genes or mutations for diagnosing disease or predicting the efficacy of a therapeutic. An isolated nucleic acid may also be purified so as to be substantially free of other cellular components or other contaminants, e.g., other cellular nucleic acids or proteins, using standard techniques well known in the art.

[0143] As used herein, the term “antibody” or “antibodies” are used in the broadest sense and encompasses various antibody structures, including but not limited to monoclonal antibodies, polyclonal antibodies, multispecific antibodies (e.g., bispecific antibodies), and antibody fragments so long as they exhibit the desired antigen-binding activity (i.e. antigen binding fragments as defined herein). The term antibody thus includes, for example, include full-length antibodies, antigen-binding fragments of full-length antibodies, molecules comprising antibody CDRs, VH regions, and/or VL regions; and antibody-like scaffolds (e.g., fibronectins). Examples of antibodies include, without limitation, monoclonal antibodies, recombinantly produced antibodies, monospecific antibodies, multispecific antibodies (including bispecific antibodies), human antibodies, humanized antibodies, chimeric antibodies, immunoglobulins, synthetic antibodies, tetrameric antibodies comprising two heavy chain and two light chain molecules, an antibody light chain monomer, an antibody heavy chain monomer, an antibody light chain dimer, an antibody heavy chain dimer, an antibody light chain-antibody heavy chain pair, intrabodies, heteroconjugate antibodies, antibody-drug conjugates, single domain antibodies (e.g., VHH, (VHH)₂), monovalent antibodies, single chain antibodies, single-chain Fvs (scFv; (scFv)₂), camelized antibodies, affybodies, Fab fragments (e.g., Fab, single chain Fab (scFab), F(ab′)₂ fragments, disulfide-linked Fvs (sdFv), anti-idiotypic (anti-Id) antibodies (including, e.g., anti-anti-Id antibodies), diabodies, tribodies, and antibody-like scaffolds (e.g., fibronectins), Fc fusions (e.g., Fab-Fc, scFv-Fc, VHH-Fc, (scFv)₂-Fc, (VHH)₂-Fc, and antigen-binding fragments of any of the above, and conjugates or fusion proteins comprising any of the above. In certain embodiments, antibodies described herein refer to polyclonal antibody populations. In certain embodiments, antibodies described herein refer to monoclonal antibody populations. Antibodies can be of any type (e.g., IgG, IgE, IgM, IgD, IgA or IgY), any class (e.g., IgG₁, IgG₂, IgG₃, IgG₄, IgA₁ or IgA₂), or any subclass (e.g., IgG₂ₐ or IgG_{2b}) of immunoglobulin (Ig) molecule. In certain embodiments, antibodies described herein are IgG antibodies, or a class (e.g., human IgG₁ or IgG₄) or subclass thereof. In a specific embodiment, the antibody is a humanized monoclonal antibody. In another specific embodiment, the antibody is a human monoclonal antibody.

[0144] The term “full-length antibody,” as used herein refers to an antibody having a structure substantially similar to a native antibody structure comprising two heavy chains and two light chains interconnected by disulfide bonds. In some embodiments, the two heavy chains comprise a substantially identical amino acid sequence; and the two light chains comprise a substantially identical amino acid sequence. Antibody chains may be substantially identical but not entirely identical if they differ due to post-translational modifications, such as C-terminal cleavage of lysine residues, alternative glycosylation patterns, etc.

[0145] The terms “antigen binding fragment” and “antigen binding domain” are used interchangeably herein and refer to one or more polypeptides, other than a full-length antibody, that is capable of specifically binding to antigen and comprises a portion of a full-length antibody (e.g., a VH, a VL). Exemplary antigen binding fragments include, but are not limited to, single domain antibodies (e.g., VHH, (VHH)₂), single chain antibodies, single-chain Fvs (scFv; (scFv)₂), camelized antibodies, affybodies, Fab fragments (e.g., Fab, single chain Fab (scFab), F(ab′)₂ fragments, and disulfide-linked Fvs (sdFv). The antigen binding domain can be part of a larger protein, e.g., a full-length antibody.

[0146] The term “(scFv)₂” as used herein refers to an antibody that comprises a first and a second scFv operably connected (e.g., via a linker). The first and second scFv can specifically bind the same or different antigens. In some embodiments, the first and second scFv are operably connected by an amino via an amino acid linker.

[0147] The term “(VHH)₂” as used herein refers to an antibody that comprises a first and a second VHH operably connected (e.g., via a linker). The first and the second VHH can specifically bind the same or different antigens. In some embodiments, the first and second VHH are operably connected by an amino via an amino acid linker.

[0148] The term “Fab-Fc” as used herein refers to an antibody that comprises a Fab operably linked to an Fc domain or a subunit of an Fc domain. A full-length antibody described herein comprises two Fabs, one Fab operably connected to one Fc domain and the other Fab operably connected to a second Fc domain.

[0149] The term “scFv-Fc” as used herein refers to an antibody that comprises a scFv operably linked to an Fc domain or subunit of an Fc domain.

[0150] The term “VHH-Fc” as used herein refers to an antibody that comprises a VHH operably linked to an Fc domain or a subunit of an Fc domain.

[0151] The term “(scFv)₂-Fc” as used herein refers to a (scFv)₂ operably linked to an Fc domain or a subunit of an Fc domain.

[0152] The term “(VHH)₂-Fc” as used herein refers to (VHH)₂ operably linked to an Fc domain or a subunit of an Fc domain.

[0153] “Antibody-like scaffolds” are known in the art, for example, fibronectin and designed ankyrin repeat proteins (DARPins) have been used as alternative scaffolds for antigen-binding domains, see, e.g., Gebauer and Skerra, Engineered protein scaffolds as next-generation antibody therapeutics. Curr Opin Chem Biol 13:245-255 (2009) and Stumpp et al., Darpins: A new generation of protein therapeutics. Drug Discovery Today 13: 695-701 (2008). Exemplary antibody-like scaffold proteins include, but are not limited to, lipocalins (Anticalin), Protein A-derived molecules such as Z-domains of Protein A (Affibody), an A-domain (Avimer/Maxibody), a serum transferrin (trans-body); a designed ankyrin repeat protein (DARPin), VNAR fragments, a fibronectin (AdNectin), a C-type lectin domain (Tetranectin); a variable domain of a new antigen receptor beta-lactamase (VNAR fragments), a human gamma-crystallin or ubiquitin (Affilin molecules); a kunitz type domain of human protease inhibitors, microbodies such as the proteins from the knottin family, peptide aptamers and fibronectin (adnectin).

[0154] As used herein, the term “CDR” or “complementarity determining region” means the noncontiguous antigen combining sites found within the variable region of both heavy and light chain polypeptides. These particular regions have been described by Kabat et al., J. Biol. Chem. 252, 6609-6616 (1977) and Kabat et al., Sequences of protein of immunological interest. (1991), all of which are herein incorporated by reference in their entireties. Unless otherwise specified, the term “CDR” is a CDR as defined by Kabat et al., J. Biol. Chem. 252, 6609-6616 (1977) and Kabat et al., Sequences of protein of immunological interest. (1991).

[0155] As used herein, the term “framework (FR) amino acid residues” refers to those amino acids in the framework region of an antibody variable region. The term “framework region” or “FR region” as used herein, includes the amino acid residues that are part of the variable region, but are not part of the CDRs (e.g., using the Kabat definition of CDRs).

[0156] As used herein, the term “heavy chain” when used in reference to an antibody can refer to any distinct type, e.g., alpha (a), delta (6), epsilon (F), gamma (γ), and mu (p), based on the amino acid sequence of the constant domain, which give rise to IgA, IgD, IgE, IgG, and IgM classes of antibodies, respectively, including subclasses of IgG, e.g., IgG₁, IgG₂, IgG₃, and IgG₄.

[0157] As used herein, the term “light chain” when used in reference to an antibody can refer to any distinct type, e.g., kappa (κ) or lambda (λ) based on the amino acid sequence of the constant domains. Light chain amino acid sequences are well known in the art. In specific embodiments, the light chain is a human light chain.

[0158] As used herein, the terms “variable region” refers to a portion of an antibody, generally, a portion of a light or heavy chain, typically about the amino-terminal 110 to 120 amino acids or 110 to 125 amino acids in the mature heavy chain and about 90 to 115 amino acids in the mature light chain, which differ extensively in sequence among antibodies and are used in the binding and specificity of a particular antibody for its particular antigen. The variability in sequence is concentrated in those regions called complementarity determining regions (CDRs) while the more highly conserved regions in the variable domain are called framework regions (FR). Without wishing to be bound by any particular mechanism or theory, it is believed that the CDRs of the light and heavy chains are primarily responsible for the interaction and specificity of the antibody with antigen. In certain embodiments, the variable region is a human variable region. In certain embodiments, the variable region comprises rodent or murine CDRs and human framework regions (FRs). In particular embodiments, the variable region is a primate (e.g., non-human primate) variable region. In certain embodiments, the variable region comprises rodent or murine CDRs and primate (e.g., non-human primate) framework regions (FRs).

[0159] The terms “VL” and “VL domain” are used interchangeably to refer to the light chain variable region of an antibody.

[0160] The terms “VH” and “VH domain” are used interchangeably to refer to the heavy chain variable region of an antibody.

[0161] As used herein, the terms “constant region” and “constant domain” are interchangeable and are common in the art. The constant region is an antibody portion, e.g., a carboxyl terminal portion of a light and/or heavy chain which is not directly involved in binding of an antibody to antigen but which can exhibit various effector functions, such as interaction with an Fc receptor (e.g., Fc gamma receptor). The constant region of an immunoglobulin (Ig) molecule generally has a more conserved amino acid sequence relative to an immunoglobulin (Ig) variable domain.

[0162] The term “Fc region” as used herein refers to the C-terminal region of an immunoglobulin (Ig) heavy chain that comprises from N- to C-terminus at least a CH2 domain operably connected to a CH3 domain. In some embodiments, the Fc region comprises an immunoglobulin (Ig) hinge region operably connected to the N-terminus of the CH2 domain. Examples of proteins with engineered Fc regions can be found in Saunders 2019 (K. O. Saunders, “Conceptual Approaches to Modulating Antibody Effector Functions and Circulation Half-Life,” 2019, Frontiers in Immunology, V. 10, Art. 1296, pp. 1-20, which is incorporated by reference herein).

[0163] As used herein, the term “EU numbering system” refers to the EU numbering convention for the constant regions of an antibody, as described in Edelman, G. M. et al., Proc. Natl. Acad. USA, 63, 78-85 (1969) and Kabat et al, Sequences of Proteins of Immunological Interest, U.S. Dept. Health and Human Services, 5th edition, 1991, each of which is herein incorporated by reference in its entirety.

[0164] As used herein, the term “Kabat numbering system” refers to the Kabat numbering convention for variable regions of an antibody, see e.g., Kabat et al, Sequences of Proteins of Immunological Interest, U.S. Dept. Health and Human Services, 5th edition, 1991. Unless otherwise noted, numbering of the variable regions of an antibody are denoted according to the Kabat numbering system.

[0165] As used herein, the terms “specifically binds,” refers to molecules that bind to an antigen (e.g., epitope or immune complex) as such binding is understood by one skilled in the art. For example, a molecule that specifically binds to an antigen can bind to other peptides or polypeptides, generally with lower affinity as determined by, e.g., immunoassays, BIAcore©, KinExA 3000 instrument (Sapidyne Instruments, Boise, ID), or other assays known in the art. In a specific embodiment, molecules that specifically bind to an antigen bind to the antigen with a K_{A} that is at least 2 logs (e.g., factors of 10), 2.5 logs, 3 logs, 4 logs or greater than the K_{A} when the molecules bind non-specifically to another antigen. The skilled worker will appreciate that an antibody, as described herein, can specifically bind to more than one antigen (e.g., via different regions of the antibody molecule). The term specifically binds includes molecules that are cross reactive with the same antigen of a different species. For example, an antigen binding domain that specifically binds human CD20 may be cross reactive with CD20 of another species (e.g., cynomolgus monkey, or murine), and still be considered herein to specifically bind human CD20.

[0166] “Affinity” refers to the strength of the sum total of non-covalent interactions between a single binding site of a molecule (e.g., a receptor) and its binding partner (e.g., a ligand). Unless indicated otherwise, as used herein, “binding affinity” refers to intrinsic binding affinity, which reflects a 1:1 interaction between members of a binding pair (e.g., an antigen binding moiety and an antigen, or a receptor and its ligand). The affinity of a molecule X for its partner Y can generally be represented by the dissociation constant (KD), which is the ratio of dissociation and association rate constants (koff and kon, respectively). Thus, equivalent affinities may comprise different rate constants, as long as the ratio of the rate constants remains the same. Affinity can be measured by well-established methods known in the art, including those described herein. A particular method for measuring affinity is Surface Plasmon Resonance (SPR).

[0167] The determination of “percent identity” between two sequences (e.g., amino acid sequences or nucleic acid sequences) can be accomplished using a mathematical algorithm. Identity measures the percent of identical matches between the smaller of two or more sequences with gap alignments (if any) addressed by a particular mathematical model or computer program (i.e., “algorithms”). A specific, non-limiting example of a mathematical algorithm utilized for the comparison of two sequences is the algorithm of Karlin S & Altschul S F (1990) PNAS 87: 2264-2268, modified as in Karlin S & Altschul S F (1993) PNAS 90: 5873-5877, each of which is herein incorporated by reference in its entirety. Such an algorithm is incorporated into the BLASTN, BLASTP, BLASTX programs of Altschul S F et al., (1990) J Mol Biol 215: 403, which is herein incorporated by reference in its entirety. BLAST nucleotide searches can be performed with the NBLAST nucleotide program parameters set, e.g., for score=100, wordlength=12 to obtain nucleotide sequences homologous to a nucleic acid molecule described herein. BLAST protein searches can be performed with the BLASTP program parameters set, e.g., default settings; to obtain amino acid sequences homologous to a protein molecule described herein. To obtain gapped alignments for comparison purposes, Gapped BLAST can be utilized as described in Altschul S F et al., (1997) Nuc Acids Res 25: 3389-3402, which is herein incorporated by reference in its entirety. Alternatively, PSI BLAST can be used to perform an iterated search which detects distant relationships between molecules (Id.). When utilizing BLAST, Gapped BLAST, and PSI Blast programs, the default parameters of the respective programs (e.g., of BLASTP and BLASTN) can be used (see, e.g., National Center for Biotechnology Information (NCBI) on the worldwide web, ncbi.nlm.nih.gov). Another specific, non-limiting example of a mathematical algorithm utilized for the comparison of sequences is the algorithm of Myers and Miller, 1988, CABIOS 4:11-17, which is herein incorporated by reference in its entirety. Such an algorithm is incorporated in the ALIGN program (version 2.0) which is part of the GCG sequence alignment software package. When utilizing the ALIGN program for comparing amino acid sequences, a PAM120 weight residue table, a gap length penalty of 12, and a gap penalty of 4 can be used. The percent identity between two sequences can be determined using techniques similar to those described above, with or without allowing gaps. In calculating percent identity, typically only exact matches are counted. As described above, the percent identity is based on the amino acid matches between the smaller of two proteins. Therefore, for example, using NCBI Basic Local Alignment Tool—BLASTP program on the default settings (Search Parameters: word size 3, expect value 0.05, hitlist 100, Gapcosts 11,1; Matrix BLOSUM62, Filter string: F; Genetic Code: 1; Window Size: 40; Threshold: 11; Composition Based Stats: 2; Karlin-Altschul Statistics: Lambda: 0.31293; 0.267; K: 0.132922; 0.041; H: 0.401809; 0.14; and Relative Statistics: Effective search space: 288906); the percent identity between SEQ ID NO: 80 and SEQ ID NO: 286 is 100% identity.

[0168] As used herein, the term “operably connected” refers to a linkage of polynucleotide sequence elements or amino acid sequence elements in a functional relationship. For example, a polynucleotide sequence is operably connected when it is placed into a functional relationship with another polynucleotide sequence. In some embodiments, a transcription regulatory polynucleotide sequence e.g., a promoter, enhancer, or other expression control element is operably-linked to a polynucleotide sequence that encodes a protein if it affects the transcription of the polynucleotide sequence that encodes the protein.

[0169] The terms “subject” and “patient” are used interchangeably herein and include any human or nonhuman animal. The term “nonhuman animal” includes, but is not limited to, vertebrates such as nonhuman primates, sheep, dogs, and rodents such as mice, rats and guinea pigs. In some embodiments, the subject is a human.

[0170] As used herein, the term “administering” refers to the physical introduction of a therapeutic agent (or a precursor of the therapeutic agent that is metabolized or altered within the body of the subject to produce the therapeutic agent in vivo) to a subject, using any of the various methods and delivery systems known to those skilled in the art. Exemplary routes of include intravenous, intramuscular, subcutaneous, intraperitoneal, spinal or other parenteral routes of administration, for example by injection or infusion. The term “parenteral administration” as used herein means modes of administration other than enteral and topical administration, usually by injection, and includes, without limitation, intravenous, intramuscular, intraarterial, intrathecal, intralymphatic, intralesional, intracapsular, intraorbital, intracardiac, intradermal, intraperitoneal, transtracheal, subcutaneous, subcuticular, intraarticular, subcapsular, subarachnoid, intraspinal, epidural and intrasternal injection and infusion, as well as in vivo electroporation. A therapeutic agent may be administered via a non-parenteral route, or orally. Other non-parenteral routes include a topical, epidermal or mucosal route of administration, for example, intranasally, vaginally, rectally, sublingually or topically. Administering can also be performed, for example, once, a plurality of times, and/or over one or more extended periods.

[0171] A “therapeutically effective amount” or “therapeutically effective dose” of a drug or therapeutic agent is any amount of the drug that, when used alone or in combination with another therapeutic agent, protects a subject against the onset of a disease or promotes disease regression evidenced by a decrease in severity of disease symptoms, an increase in frequency and duration of disease symptom-free periods, or a prevention of impairment or disability due to the disease affliction. The ability of a therapeutic agent to promote disease regression can be evaluated using a variety of methods known to the skilled practitioner, such as in human subjects during clinical trials, in animal model systems predictive of efficacy in humans, or by assaying the activity of the agent in in vitro assays.

[0172] The terms “disease,” “disorder,” and “syndrome” are used interchangeably herein.

[0173] As used herein, the terms “treat,” treating,” “treatment,” and the like refer to reducing or ameliorating a disease and/or symptom(s) associated therewith or obtaining a desired pharmacologic and/or physiologic effect. It will be appreciated that, although not precluded, treating a disease does not require that the disease or symptoms associated therewith be completely eliminated. In some embodiments, the effect is therapeutic, i.e., without limitation, the effect partially or completely reduces, diminishes, abrogates, abates, alleviates, decreases the intensity of, or cures a disease and/or adverse symptom attributable to the disease. In some embodiments, the effect is preventative, i.e., the effect protects or prevents an occurrence or reoccurrence of a disease. To this end, the presently disclosed methods comprise administering a therapeutically effective amount of a compositions as described herein.

### 5.3 Fusion Proteins

[0174] In certain aspects, provided herein are fusion proteins that comprise an effector domain comprising a catalytic domain of a deubiquitinase, or a functional fragment or functional variant thereof; and a targeting domain comprising a moiety that specifically binds a target cytosolic protein.

### 5.3.1 Effector Domain

[0175] In some embodiments, the effector domain comprises a catalytic domain of a deubiquitinase, or a functional fragment or functional variant thereof. In some embodiments, the deubiquitinase is human. In some embodiments, the catalytic domain is derived from a naturally occurring deubiquitinase (e.g., a naturally occurring human deubiquitinase).

[0176] In some embodiments, the amino acid sequence of the effector domain comprises the amino acid sequence of a full length deubiquitinase. In some embodiments, the amino acid sequence of the effector domain comprises the amino acid sequence of a catalytic domain of a deubiquitinase and an additional amino acid sequence at the N-terminal, C-terminal, or N-terminal and C-terminal end of the catalytic domain.

[0177] In some embodiments, the catalytic domain comprises a naturally occurring amino acid sequence of a deubiquitinase. In some embodiments, the catalytic domain comprises a variant of a naturally occurring deubiquitinase. In some embodiments, the amino acid sequence of the catalytic domain of the fusion protein is at least 80%, 81%, 82%, 83%, 84%, 85%, 86%, 87%, 88%, 89%, 90%, 91%, 92%, 93%, 94%, 95%, 96%, 97%, 98%, 99%, or 100% identical to the amino acid sequence of the catalytic domain of a naturally occurring deubiquitinase. In some embodiments, the amino acid sequence of the catalytic domain of the fusion protein comprises 1, 2, 3, 4, 5, 6, 7, 8, 9, 10, 15, or 20 amino acid modifications compared to the amino acid sequence of the catalytic domain of a naturally occurring deubiquitinase.

[0178] In some embodiments, the catalytic domain comprises the minimum amino acid sequence of a naturally occurring deubiquitinase sufficient to mediate deubiquitination of a target protein. In some embodiments, the catalytic domain comprises more than the minimum amino acid sequence of a naturally occurring deubiquitinase sufficient to mediate deubiquitination of a target protein.

[0179] In some embodiments, the deubiquitinase is a cysteine protease or a metalloprotease. In some embodiments, the deubiquitinase is a cysteine protease. In some embodiments, the deubiquitinase is a metalloprotease. In some embodiments, the deubiquitinase is a ubiquitin-specific protease (USP), a ubiquitin C-terminal hydrolase (UCH), a Machado-Josephin domain protease (MJD), an ovarian tumor protease (OTU), a MINDY protease, or a ZUFSP protease.

[0180] Exemplary deubiquitinases include, but are not limited to, USP1, USP2, USP3, USP4, USP5, USP6, USP7, USP8, USP9X, USP9Y, USP10, USP11, USP12, USP13, USP14, USP15, USP16, USP17, USP17L2, USP17L3, USP17L4, USP17L5, USP17L7, USP17L8, USP18, USP19, USP20, USP21, USP22, USP23, USP24, USP25, USP26, USP27X, USP28, USP29, USP30, USP31, USP32, USP33, USP34, USP35, USP36, USP37, USP38, USP39, USP40, USP41, USP42, USP43, USP44, USP45, USP46, BAP1, UCHL1, UCHL3, UCHL5, ATXN3, ATXN3L, OTUB1, OTUB2, MINDY1, MINDY2, MINDY3, MINDY4, and ZUP1. Exemplary deubiquitinases for use in the present disclosure are also disclosed in Komander, D. et al. Breaking the chains: structure and function of the deubiquitinases. Nat Rev Mol Cell Biol 10, 550-563 (2009), the entire contents of which is incorporated by reference herein.

[0181] In some embodiments, the deubiquitinase is selected from the group consisting of USP1, USP2, USP3, USP4, USP5, USP6, USP7, USP8, USP9X, USP9Y, USP10, USP11, USP12, USP13, USP14, USP15, USP16, USP17, USP17L2, USP17L3, USP17L4, USP17L5, USP17L7, USP17L8, USP18, USP19, USP20, USP21, USP22, USP23, USP24, USP25, USP26, USP27X, USP28, USP29, USP30, USP31, USP32, USP33, USP34, USP35, USP36, USP37, USP38, USP39, USP40, USP41, USP42, USP43, USP44, USP45, and USP46.

[0182] In some embodiments, the deubiquitinase is BAP1, UCHL1, UCHL3, or UCHL5. In some embodiments, the deubiquitinase is ATXN3 or ATXN3L. In some embodiments, the deubiquitinase is OTUB1 or OTUB2. In some embodiments, the deubiquitinase is MINDY1, MINDY2, MINDY3, or MINDY4. In some embodiments, the deubiquitinase is ZUP1. In some embodiments, the deubiquitinase is a Jab1/Mov34/Mpr1 Pad1 N-terminal+(MPN+) (JAMM) domain protease.

[0183] In some embodiments, the deubiquitinase is a deubiquitinase described in Table 1. In some embodiments, the amino acid sequence of the deubiquitinase comprises an amino acid sequence at least 80%, 81%, 82%, 83%, 84%, 85%, 86%, 87%, 88%, 89%, 90%, 91%, 92%, 93%, 94%, 95%, 96%, 97%, 98%, 99%, or 100% identical to the amino acid sequence of a deubiquitinase in Table 1. In some embodiments, the amino acid sequence of the effector domain comprises an amino acid sequence at least 80%, 81%, 82%, 83%, 84%, 85%, 86%, 87%, 88%, 89%, 90%, 91%, 92%, 93%, 94%, 95%, 96%, 97%, 98%, 99%, or 100% identical to a catalytic domain of a deubiquitinase in Table 1. In some embodiments, the effector domain comprises a functional fragment of a deubiquitinase in Table 1. In some embodiments, the effector domain deubiquitinase comprises a functional variant of deubiquitinase in Table 1. In some embodiments, the catalytic domain comprises a functional fragment of a catalytic domain of a deubiquitinase in Table 1. In some embodiments, the catalytic domain comprises a functional variant of a catalytic domain of a deubiquitinase in Table 1.

[0184] In some embodiments, the deubiquitinase comprises an amino acid sequence at least 80%, 81%, 82%, 83%, 84%, 85%, 86%, 87%, 88%, 89%, 90%, 91%, 92%, 93%, 94%, 95%, 96%, 97%, 98%, 99%, or 100% identical any one of SEQ ID NOS: 1-112. In some embodiments, the deubiquitinase consists of an amino acid sequence at least 80%, 81%, 82%, 83%, 84%, 85%, 86%, 87%, 88%, 89%, 90%, 91%, 92%, 93%, 94%, 95%, 96%, 97%, 98%, 99%, or 100% identical any one of SEQ ID NOS: 1-112.

[0185] In some embodiments, the deubiquitinase comprises an amino acid sequence at least 80%, 81%, 82%, 83%, 84%, 85%, 86%, 87%, 88%, 89%, 90%, 91%, 92%, 93%, 94%, 95%, 96%, 97%, 98%, 99%, or 100% identical to SEQ ID NO: 1. In some embodiments, the deubiquitinase comprises an amino acid sequence at least 80%, 81%, 82%, 83%, 84%, 85%, 86%, 87%, 88%, 89%, 90%, 91%, 92%, 93%, 94%, 95%, 96%, 97%, 98%, 99%, or 100% identical to SEQ ID NO: 2. In some embodiments, the deubiquitinase comprises an amino acid sequence at least 80%, 81%, 82%, 83%, 84%, 85%, 86%, 87%, 88%, 89%, 90%, 91%, 92%, 93%, 94%, 95%, 96%, 97%, 98%, 99%, or 100% identical to SEQ ID NO: 3. In some embodiments, the deubiquitinase comprises an amino acid sequence at least 80%, 81%, 82%, 83%, 84%, 85%, 86%, 87%, 88%, 89%, 90%, 91%, 92%, 93%, 94%, 95%, 96%, 97%, 98%, 99%, or 100% identical to SEQ ID NO: 4. In some embodiments, the deubiquitinase comprises an amino acid sequence at least 80%, 81%, 82%, 83%, 84%, 85%, 86%, 87%, 88%, 89%, 90%, 91%, 92%, 93%, 94%, 95%, 96%, 97%, 98%, 99%, or 100% identical to SEQ ID NO: 5. In some embodiments, the deubiquitinase comprises an amino acid sequence at least 80%, 81%, 82%, 83%, 84%, 85%, 86%, 87%, 88%, 89%, 90%, 91%, 92%, 93%, 94%, 95%, 96%, 97%, 98%, 99%, or 100% identical to SEQ ID NO: 6. In some embodiments, the deubiquitinase comprises an amino acid sequence at least 80%, 81%, 82%, 83%, 84%, 85%, 86%, 87%, 88%, 89%, 90%, 91%, 92%, 93%, 94%, 95%, 96%, 97%, 98%, 99%, or 100% identical to SEQ ID NO: 7. In some embodiments, the deubiquitinase comprises an amino acid sequence at least 80%, 81%, 82%, 83%, 84%, 85%, 86%, 87%, 88%, 89%, 90%, 91%, 92%, 93%, 94%, 95%, 96%, 97%, 98%, 99%, or 100% identical to SEQ ID NO: 8. In some embodiments, the deubiquitinase comprises an amino acid sequence at least 80%, 81%, 82%, 83%, 84%, 85%, 86%, 87%, 88%, 89%, 90%, 91%, 92%, 93%, 94%, 95%, 96%, 97%, 98%, 99%, or 100% identical to SEQ ID NO: 9. In some embodiments, the deubiquitinase comprises an amino acid sequence at least 80%, 81%, 82%, 83%, 84%, 85%, 86%, 87%, 88%, 89%, 90%, 91%, 92%, 93%, 94%, 95%, 96%, 97%, 98%, 99%, or 100% identical to SEQ ID NO: 10. In some embodiments, the deubiquitinase comprises an amino acid sequence at least 80%, 81%, 82%, 83%, 84%, 85%, 86%, 87%, 88%, 89%, 90%, 91%, 92%, 93%, 94%, 95%, 96%, 97%, 98%, 99%, or 100% identical to SEQ ID NO: 11. In some embodiments, the deubiquitinase comprises an amino acid sequence at least 80%, 81%, 82%, 83%, 84%, 85%, 86%, 87%, 88%, 89%, 90%, 91%, 92%, 93%, 94%, 95%, 96%, 97%, 98%, 99%, or 100% identical to SEQ ID NO: 12. In some embodiments, the deubiquitinase comprises an amino acid sequence at least 80%, 81%, 82%, 83%, 84%, 85%, 86%, 87%, 88%, 89%, 90%, 91%, 92%, 93%, 94%, 95%, 96%, 97%, 98%, 99%, or 100% identical to SEQ ID NO: 13. In some embodiments, the deubiquitinase comprises an amino acid sequence at least 80%, 81%, 82%, 83%, 84%, 85%, 86%, 87%, 88%, 89%, 90%, 91%, 92%, 93%, 94%, 95%, 96%, 97%, 98%, 99%, or 100% identical to SEQ ID NO: 14. In some embodiments, the deubiquitinase comprises an amino acid sequence at least 80%, 81%, 82%, 83%, 84%, 85%, 86%, 87%, 88%, 89%, 90%, 91%, 92%, 93%, 94%, 95%, 96%, 97%, 98%, 99%, or 100% identical to SEQ ID NO: 15. In some embodiments, the deubiquitinase comprises an amino acid sequence at least 80%, 81%, 82%, 83%, 84%, 85%, 86%, 87%, 88%, 89%, 90%, 91%, 92%, 93%, 94%, 95%, 96%, 97%, 98%, 99%, or 100% identical to SEQ ID NO: 16. In some embodiments, the deubiquitinase comprises an amino acid sequence at least 80%, 81%, 82%, 83%, 84%, 85%, 86%, 87%, 88%, 89%, 90%, 91%, 92%, 93%, 94%, 95%, 96%, 97%, 98%, 99%, or 100% identical to SEQ ID NO: 17. In some embodiments, the deubiquitinase comprises an amino acid sequence at least 80%, 81%, 82%, 83%, 84%, 85%, 86%, 87%, 88%, 89%, 90%, 91%, 92%, 93%, 94%, 95%, 96%, 97%, 98%, 99%, or 100% identical to SEQ ID NO: 18. In some embodiments, the deubiquitinase comprises an amino acid sequence at least 80%, 81%, 82%, 83%, 84%, 85%, 86%, 87%, 88%, 89%, 90%, 91%, 92%, 93%, 94%, 95%, 96%, 97%, 98%, 99%, or 100% identical to SEQ ID NO: 19. In some embodiments, the deubiquitinase comprises an amino acid sequence at least 80%, 81%, 82%, 83%, 84%, 85%, 86%, 87%, 88%, 89%, 90%, 91%, 92%, 93%, 94%, 95%, 96%, 97%, 98%, 99%, or 100% identical to SEQ ID NO: 20. In some embodiments, the deubiquitinase comprises an amino acid sequence at least 80%, 81%, 82%, 83%, 84%, 85%, 86%, 87%, 88%, 89%, 90%, 91%, 92%, 93%, 94%, 95%, 96%, 97%, 98%, 99%, or 100% identical to SEQ ID NO: 21. In some embodiments, the deubiquitinase comprises an amino acid sequence at least 80%, 81%, 82%, 83%, 84%, 85%, 86%, 87%, 88%, 89%, 90%, 91%, 92%, 93%, 94%, 95%, 96%, 97%, 98%, 99%, or 100% identical to SEQ ID NO: 22. In some embodiments, the deubiquitinase comprises an amino acid sequence at least 80%, 81%, 82%, 83%, 84%, 85%, 86%, 87%, 88%, 89%, 90%, 91%, 92%, 93%, 94%, 95%, 96%, 97%, 98%, 99%, or 100% identical to SEQ ID NO: 23. In some embodiments, the deubiquitinase comprises an amino acid sequence at least 80%, 81%, 82%, 83%, 84%, 85%, 86%, 87%, 88%, 89%, 90%, 91%, 92%, 93%, 94%, 95%, 96%, 97%, 98%, 99%, or 100% identical to SEQ ID NO: 24. In some embodiments, the deubiquitinase comprises an amino acid sequence at least 80%, 81%, 82%, 83%, 84%, 85%, 86%, 87%, 88%, 89%, 90%, 91%, 92%, 93%, 94%, 95%, 96%, 97%, 98%, 99%, or 100% identical to SEQ ID NO: 25. In some embodiments, the deubiquitinase comprises an amino acid sequence at least 80%, 81%, 82%, 83%, 84%, 85%, 86%, 87%, 88%, 89%, 90%, 91%, 92%, 93%, 94%, 95%, 96%, 97%, 98%, 99%, or 100% identical to SEQ ID NO: 26. In some embodiments, the deubiquitinase comprises an amino acid sequence at least 80%, 81%, 82%, 83%, 84%, 85%, 86%, 87%, 88%, 89%, 90%, 91%, 92%, 93%, 94%, 95%, 96%, 97%, 98%, 99%, or 100% identical to SEQ ID NO: 27. In some embodiments, the deubiquitinase comprises an amino acid sequence at least 80%, 81%, 82%, 83%, 84%, 85%, 86%, 87%, 88%, 89%, 90%, 91%, 92%, 93%, 94%, 95%, 96%, 97%, 98%, 99%, or 100% identical to SEQ ID NO: 28. In some embodiments, the deubiquitinase comprises an amino acid sequence at least 80%, 81%, 82%, 83%, 84%, 85%, 86%, 87%, 88%, 89%, 90%, 91%, 92%, 93%, 94%, 95%, 96%, 97%, 98%, 99%, or 100% identical to SEQ ID NO: 29. In some embodiments, the deubiquitinase comprises an amino acid sequence at least 80%, 81%, 82%, 83%, 84%, 85%, 86%, 87%, 88%, 89%, 90%, 91%, 92%, 93%, 94%, 95%, 96%, 97%, 98%, 99%, or 100% identical to SEQ ID NO: 30. In some embodiments, the deubiquitinase comprises an amino acid sequence at least 80%, 81%, 82%, 83%, 84%, 85%, 86%, 87%, 88%, 89%, 90%, 91%, 92%, 93%, 94%, 95%, 96%, 97%, 98%, 99%, or 100% identical to SEQ ID NO: 31. In some embodiments, the deubiquitinase comprises an amino acid sequence at least 80%, 81%, 82%, 83%, 84%, 85%, 86%, 87%, 88%, 89%, 90%, 91%, 92%, 93%, 94%, 95%, 96%, 97%, 98%, 99%, or 100% identical to SEQ ID NO: 32. In some embodiments, the deubiquitinase comprises an amino acid sequence at least 80%, 81%, 82%, 83%, 84%, 85%, 86%, 87%, 88%, 89%, 90%, 91%, 92%, 93%, 94%, 95%, 96%, 97%, 98%, 99%, or 100% identical to SEQ ID NO: 33. In some embodiments, the deubiquitinase comprises an amino acid sequence at least 80%, 81%, 82%, 83%, 84%, 85%, 86%, 87%, 88%, 89%, 90%, 91%, 92%, 93%, 94%, 95%, 96%, 97%, 98%, 99%, or 100% identical to SEQ ID NO: 34. In some embodiments, the deubiquitinase comprises an amino acid sequence at least 80%, 81%, 82%, 83%, 84%, 85%, 86%, 87%, 88%, 89%, 90%, 91%, 92%, 93%, 94%, 95%, 96%, 97%, 98%, 99%, or 100% identical to SEQ ID NO: 35. In some embodiments, the deubiquitinase comprises an amino acid sequence at least 80%, 81%, 82%, 83%, 84%, 85%, 86%, 87%, 88%, 89%, 90%, 91%, 92%, 93%, 94%, 95%, 96%, 97%, 98%, 99%, or 100% identical to SEQ ID NO: 36. In some embodiments, the deubiquitinase comprises an amino acid sequence at least 80%, 81%, 82%, 83%, 84%, 85%, 86%, 87%, 88%, 89%, 90%, 91%, 92%, 93%, 94%, 95%, 96%, 97%, 98%, 99%, or 100% identical to SEQ ID NO: 37. In some embodiments, the deubiquitinase comprises an amino acid sequence at least 80%, 81%, 82%, 83%, 84%, 85%, 86%, 87%, 88%, 89%, 90%, 91%, 92%, 93%, 94%, 95%, 96%, 97%, 98%, 99%, or 100% identical to SEQ ID NO: 38. In some embodiments, the deubiquitinase comprises an amino acid sequence at least 80%, 81%, 82%, 83%, 84%, 85%, 86%, 87%, 88%, 89%, 90%, 91%, 92%, 93%, 94%, 95%, 96%, 97%, 98%, 99%, or 100% identical to SEQ ID NO: 39. In some embodiments, the deubiquitinase comprises an amino acid sequence at least 80%, 81%, 82%, 83%, 84%, 85%, 86%, 87%, 88%, 89%, 90%, 91%, 92%, 93%, 94%, 95%, 96%, 97%, 98%, 99%, or 100% identical to SEQ ID NO: 40. In some embodiments, the deubiquitinase comprises an amino acid sequence at least 80%, 81%, 82%, 83%, 84%, 85%, 86%, 87%, 88%, 89%, 90%, 91%, 92%, 93%, 94%, 95%, 96%, 97%, 98%, 99%, or 100% identical to SEQ ID NO: 41. In some embodiments, the deubiquitinase comprises an amino acid sequence at least 80%, 81%, 82%, 83%, 84%, 85%, 86%, 87%, 88%, 89%, 90%, 91%, 92%, 93%, 94%, 95%, 96%, 97%, 98%, 99%, or 100% identical to SEQ ID NO: 42. In some embodiments, the deubiquitinase comprises an amino acid sequence at least 80%, 81%, 82%, 83%, 84%, 85%, 86%, 87%, 88%, 89%, 90%, 91%, 92%, 93%, 94%, 95%, 96%, 97%, 98%, 99%, or 100% identical to SEQ ID NO: 43. In some embodiments, the deubiquitinase comprises an amino acid sequence at least 80%, 81%, 82%, 83%, 84%, 85%, 86%, 87%, 88%, 89%, 90%, 91%, 92%, 93%, 94%, 95%, 96%, 97%, 98%, 99%, or 100% identical to SEQ ID NO: 44. In some embodiments, the deubiquitinase comprises an amino acid sequence at least 80%, 81%, 82%, 83%, 84%, 85%, 86%, 87%, 88%, 89%, 90%, 91%, 92%, 93%, 94%, 95%, 96%, 97%, 98%, 99%, or 100% identical to SEQ ID NO: 45. In some embodiments, the deubiquitinase comprises an amino acid sequence at least 80%, 81%, 82%, 83%, 84%, 85%, 86%, 87%, 88%, 89%, 90%, 91%, 92%, 93%, 94%, 95%, 96%, 97%, 98%, 99%, or 100% identical to SEQ ID NO: 46. In some embodiments, the deubiquitinase comprises an amino acid sequence at least 80%, 81%, 82%, 83%, 84%, 85%, 86%, 87%, 88%, 89%, 90%, 91%, 92%, 93%, 94%, 95%, 96%, 97%, 98%, 99%, or 100% identical to SEQ ID NO: 47. In some embodiments, the deubiquitinase comprises an amino acid sequence at least 80%, 81%, 82%, 83%, 84%, 85%, 86%, 87%, 88%, 89%, 90%, 91%, 92%, 93%, 94%, 95%, 96%, 97%, 98%, 99%, or 100% identical to SEQ ID NO: 48. In some embodiments, the deubiquitinase comprises an amino acid sequence at least 80%, 81%, 82%, 83%, 84%, 85%, 86%, 87%, 88%, 89%, 90%, 91%, 92%, 93%, 94%, 95%, 96%, 97%, 98%, 99%, or 100% identical to SEQ ID NO: 49. In some embodiments, the deubiquitinase comprises an amino acid sequence at least 80%, 81%, 82%, 83%, 84%, 85%, 86%, 87%, 88%, 89%, 90%, 91%, 92%, 93%, 94%, 95%, 96%, 97%, 98%, 99%, or 100% identical to SEQ ID NO: 50. In some embodiments, the deubiquitinase comprises an amino acid sequence at least 80%, 81%, 82%, 83%, 84%, 85%, 86%, 87%, 88%, 89%, 90%, 91%, 92%, 93%, 94%, 95%, 96%, 97%, 98%, 99%, or 100% identical to SEQ ID NO: 51. In some embodiments, the deubiquitinase comprises an amino acid sequence at least 80%, 81%, 82%, 83%, 84%, 85%, 86%, 87%, 88%, 89%, 90%, 91%, 92%, 93%, 94%, 95%, 96%, 97%, 98%, 99%, or 100% identical to SEQ ID NO: 52. In some embodiments, the deubiquitinase comprises an amino acid sequence at least 80%, 81%, 82%, 83%, 84%, 85%, 86%, 87%, 88%, 89%, 90%, 91%, 92%, 93%, 94%, 95%, 96%, 97%, 98%, 99%, or 100% identical to SEQ ID NO: 53. In some embodiments, the deubiquitinase comprises an amino acid sequence at least 80%, 81%, 82%, 83%, 84%, 85%, 86%, 87%, 88%, 89%, 90%, 91%, 92%, 93%, 94%, 95%, 96%, 97%, 98%, 99%, or 100% identical to SEQ ID NO: 54. In some embodiments, the deubiquitinase comprises an amino acid sequence at least 80%, 81%, 82%, 83%, 84%, 85%, 86%, 87%, 88%, 89%, 90%, 91%, 92%, 93%, 94%, 95%, 96%, 97%, 98%, 99%, or 100% identical to SEQ ID NO: 55. In some embodiments, the deubiquitinase comprises an amino acid sequence at least 80%, 81%, 82%, 83%, 84%, 85%, 86%, 87%, 88%, 89%, 90%, 91%, 92%, 93%, 94%, 95%, 96%, 97%, 98%, 99%, or 100% identical to SEQ ID NO: 56. In some embodiments, the deubiquitinase comprises an amino acid sequence at least 80%, 81%, 82%, 83%, 84%, 85%, 86%, 87%, 88%, 89%, 90%, 91%, 92%, 93%, 94%, 95%, 96%, 97%, 98%, 99%, or 100% identical to SEQ ID NO: 57. In some embodiments, the deubiquitinase comprises an amino acid sequence at least 80%, 81%, 82%, 83%, 84%, 85%, 86%, 87%, 88%, 89%, 90%, 91%, 92%, 93%, 94%, 95%, 96%, 97%, 98%, 99%, or 100% identical to SEQ ID NO: 58. In some embodiments, the deubiquitinase comprises an amino acid sequence at least 80%, 81%, 82%, 83%, 84%, 85%, 86%, 87%, 88%, 89%, 90%, 91%, 92%, 93%, 94%, 95%, 96%, 97%, 98%, 99%, or 100% identical to SEQ ID NO: 59. In some embodiments, the deubiquitinase comprises an amino acid sequence at least 80%, 81%, 82%, 83%, 84%, 85%, 86%, 87%, 88%, 89%, 90%, 91%, 92%, 93%, 94%, 95%, 96%, 97%, 98%, 99%, or 100% identical to SEQ ID NO: 60. In some embodiments, the deubiquitinase comprises an amino acid sequence at least 80%, 81%, 82%, 83%, 84%, 85%, 86%, 87%, 88%, 89%, 90%, 91%, 92%, 93%, 94%, 95%, 96%, 97%, 98%, 99%, or 100% identical to SEQ ID NO: 61. In some embodiments, the deubiquitinase comprises an amino acid sequence at least 80%, 81%, 82%, 83%, 84%, 85%, 86%, 87%, 88%, 89%, 90%, 91%, 92%, 93%, 94%, 95%, 96%, 97%, 98%, 99%, or 100% identical to SEQ ID NO: 62. In some embodiments, the deubiquitinase comprises an amino acid sequence at least 80%, 81%, 82%, 83%, 84%, 85%, 86%, 87%, 88%, 89%, 90%, 91%, 92%, 93%, 94%, 95%, 96%, 97%, 98%, 99%, or 100% identical to SEQ ID NO: 63. In some embodiments, the deubiquitinase comprises an amino acid sequence at least 80%, 81%, 82%, 83%, 84%, 85%, 86%, 87%, 88%, 89%, 90%, 91%, 92%, 93%, 94%, 95%, 96%, 97%, 98%, 99%, or 100% identical to SEQ ID NO: 64. In some embodiments, the deubiquitinase comprises an amino acid sequence at least 80%, 81%, 82%, 83%, 84%, 85%, 86%, 87%, 88%, 89%, 90%, 91%, 92%, 93%, 94%, 95%, 96%, 97%, 98%, 99%, or 100% identical to SEQ ID NO: 65. In some embodiments, the deubiquitinase comprises an amino acid sequence at least 80%, 81%, 82%, 83%, 84%, 85%, 86%, 87%, 88%, 89%, 90%, 91%, 92%, 93%, 94%, 95%, 96%, 97%, 98%, 99%, or 100% identical to SEQ ID NO: 66. In some embodiments, the deubiquitinase comprises an amino acid sequence at least 80%, 81%, 82%, 83%, 84%, 85%, 86%, 87%, 88%, 89%, 90%, 91%, 92%, 93%, 94%, 95%, 96%, 97%, 98%, 99%, or 100% identical to SEQ ID NO: 67. In some embodiments, the deubiquitinase comprises an amino acid sequence at least 80%, 81%, 82%, 83%, 84%, 85%, 86%, 87%, 88%, 89%, 90%, 91%, 92%, 93%, 94%, 95%, 96%, 97%, 98%, 99%, or 100% identical to SEQ ID NO: 68. In some embodiments, the deubiquitinase comprises an amino acid sequence at least 80%, 81%, 82%, 83%, 84%, 85%, 86%, 87%, 88%, 89%, 90%, 91%, 92%, 93%, 94%, 95%, 96%, 97%, 98%, 99%, or 100% identical to SEQ ID NO: 69. In some embodiments, the deubiquitinase comprises an amino acid sequence at least 80%, 81%, 82%, 83%, 84%, 85%, 86%, 87%, 88%, 89%, 90%, 91%, 92%, 93%, 94%, 95%, 96%, 97%, 98%, 99%, or 100% identical to SEQ ID NO: 70. In some embodiments, the deubiquitinase comprises an amino acid sequence at least 80%, 81%, 82%, 83%, 84%, 85%, 86%, 87%, 88%, 89%, 90%, 91%, 92%, 93%, 94%, 95%, 96%, 97%, 98%, 99%, or 100% identical to SEQ ID NO: 71. In some embodiments, the deubiquitinase comprises an amino acid sequence at least 80%, 81%, 82%, 83%, 84%, 85%, 86%, 87%, 88%, 89%, 90%, 91%, 92%, 93%, 94%, 95%, 96%, 97%, 98%, 99%, or 100% identical to SEQ ID NO: 72. In some embodiments, the deubiquitinase comprises an amino acid sequence at least 80%, 81%, 82%, 83%, 84%, 85%, 86%, 87%, 88%, 89%, 90%, 91%, 92%, 93%, 94%, 95%, 96%, 97%, 98%, 99%, or 100% identical to SEQ ID NO: 73. In some embodiments, the deubiquitinase comprises an amino acid sequence at least 80%, 81%, 82%, 83%, 84%, 85%, 86%, 87%, 88%, 89%, 90%, 91%, 92%, 93%, 94%, 95%, 96%, 97%, 98%, 99%, or 100% identical to SEQ ID NO: 74. In some embodiments, the deubiquitinase comprises an amino acid sequence at least 80%, 81%, 82%, 83%, 84%, 85%, 86%, 87%, 88%, 89%, 90%, 91%, 92%, 93%, 94%, 95%, 96%, 97%, 98%, 99%, or 100% identical to SEQ ID NO: 75. In some embodiments, the deubiquitinase comprises an amino acid sequence at least 80%, 81%, 82%, 83%, 84%, 85%, 86%, 87%, 88%, 89%, 90%, 91%, 92%, 93%, 94%, 95%, 96%, 97%, 98%, 99%, or 100% identical to SEQ ID NO: 76. In some embodiments, the deubiquitinase comprises an amino acid sequence at least 80%, 81%, 82%, 83%, 84%, 85%, 86%, 87%, 88%, 89%, 90%, 91%, 92%, 93%, 94%, 95%, 96%, 97%, 98%, 99%, or 100% identical to SEQ ID NO: 77. In some embodiments, the deubiquitinase comprises an amino acid sequence at least 80%, 81%, 82%, 83%, 84%, 85%, 86%, 87%, 88%, 89%, 90%, 91%, 92%, 93%, 94%, 95%, 96%, 97%, 98%, 99%, or 100% identical to SEQ ID NO: 78. In some embodiments, the deubiquitinase comprises an amino acid sequence at least 80%, 81%, 82%, 83%, 84%, 85%, 86%, 87%, 88%, 89%, 90%, 91%, 92%, 93%, 94%, 95%, 96%, 97%, 98%, 99%, or 100% identical to SEQ ID NO: 79. In some embodiments, the deubiquitinase comprises an amino acid sequence at least 80%, 81%, 82%, 83%, 84%, 85%, 86%, 87%, 88%, 89%, 90%, 91%, 92%, 93%, 94%, 95%, 96%, 97%, 98%, 99%, or 100% identical to SEQ ID NO: 80. In some embodiments, the deubiquitinase comprises an amino acid sequence at least 80%, 81%, 82%, 83%, 84%, 85%, 86%, 87%, 88%, 89%, 90%, 91%, 92%, 93%, 94%, 95%, 96%, 97%, 98%, 99%, or 100% identical to SEQ ID NO: 81. In some embodiments, the deubiquitinase comprises an amino acid sequence at least 80%, 81%, 82%, 83%, 84%, 85%, 86%, 87%, 88%, 89%, 90%, 91%, 92%, 93%, 94%, 95%, 96%, 97%, 98%, 99%, or 100% identical to SEQ ID NO: 82. In some embodiments, the deubiquitinase comprises an amino acid sequence at least 80%, 81%, 82%, 83%, 84%, 85%, 86%, 87%, 88%, 89%, 90%, 91%, 92%, 93%, 94%, 95%, 96%, 97%, 98%, 99%, or 100% identical to SEQ ID NO: 83. In some embodiments, the deubiquitinase comprises an amino acid sequence at least 80%, 81%, 82%, 83%, 84%, 85%, 86%, 87%, 88%, 89%, 90%, 91%, 92%, 93%, 94%, 95%, 96%, 97%, 98%, 99%, or 100% identical to SEQ ID NO: 84. In some embodiments, the deubiquitinase comprises an amino acid sequence at least 80%, 81%, 82%, 83%, 84%, 85%, 86%, 87%, 88%, 89%, 90%, 91%, 92%, 93%, 94%, 95%, 96%, 97%, 98%, 99%, or 100% identical to SEQ ID NO: 85. In some embodiments, the deubiquitinase comprises an amino acid sequence at least 80%, 81%, 82%, 83%, 84%, 85%, 86%, 87%, 88%, 89%, 90%, 91%, 92%, 93%, 94%, 95%, 96%, 97%, 98%, 99%, or 100% identical to SEQ ID NO: 86. In some embodiments, the deubiquitinase comprises an amino acid sequence at least 80%, 81%, 82%, 83%, 84%, 85%, 86%, 87%, 88%, 89%, 90%, 91%, 92%, 93%, 94%, 95%, 96%, 97%, 98%, 99%, or 100% identical to SEQ ID NO: 87. In some embodiments, the deubiquitinase comprises an amino acid sequence at least 80%, 81%, 82%, 83%, 84%, 85%, 86%, 87%, 88%, 89%, 90%, 91%, 92%, 93%, 94%, 95%, 96%, 97%, 98%, 99%, or 100% identical to SEQ ID NO: 88. In some embodiments, the deubiquitinase comprises an amino acid sequence at least 80%, 81%, 82%, 83%, 84%, 85%, 86%, 87%, 88%, 89%, 90%, 91%, 92%, 93%, 94%, 95%, 96%, 97%, 98%, 99%, or 100% identical to SEQ ID NO: 89. In some embodiments, the deubiquitinase comprises an amino acid sequence at least 80%, 81%, 82%, 83%, 84%, 85%, 86%, 87%, 88%, 89%, 90%, 91%, 92%, 93%, 94%, 95%, 96%, 97%, 98%, 99%, or 100% identical to SEQ ID NO: 90. In some embodiments, the deubiquitinase comprises an amino acid sequence at least 80%, 81%, 82%, 83%, 84%, 85%, 86%, 87%, 88%, 89%, 90%, 91%, 92%, 93%, 94%, 95%, 96%, 97%, 98%, 99%, or 100% identical to SEQ ID NO: 91. In some embodiments, the deubiquitinase comprises an amino acid sequence at least 80%, 81%, 82%, 83%, 84%, 85%, 86%, 87%, 88%, 89%, 90%, 91%, 92%, 93%, 94%, 95%, 96%, 97%, 98%, 99%, or 100% identical to SEQ ID NO: 92. In some embodiments, the deubiquitinase comprises an amino acid sequence at least 80%, 81%, 82%, 83%, 84%, 85%, 86%, 87%, 88%, 89%, 90%, 91%, 92%, 93%, 94%, 95%, 96%, 97%, 98%, 99%, or 100% identical to SEQ ID NO: 93. In some embodiments, the deubiquitinase comprises an amino acid sequence at least 80%, 81%, 82%, 83%, 84%, 85%, 86%, 87%, 88%, 89%, 90%, 91%, 92%, 93%, 94%, 95%, 96%, 97%, 98%, 99%, or 100% identical to SEQ ID NO: 94. In some embodiments, the deubiquitinase comprises an amino acid sequence at least 80%, 81%, 82%, 83%, 84%, 85%, 86%, 87%, 88%, 89%, 90%, 91%, 92%, 93%, 94%, 95%, 96%, 97%, 98%, 99%, or 100% identical to SEQ ID NO: 95. In some embodiments, the deubiquitinase comprises an amino acid sequence at least 80%, 81%, 82%, 83%, 84%, 85%, 86%, 87%, 88%, 89%, 90%, 91%, 92%, 93%, 94%, 95%, 96%, 97%, 98%, 99%, or 100% identical to SEQ ID NO: 96. In some embodiments, the deubiquitinase comprises an amino acid sequence at least 80%, 81%, 82%, 83%, 84%, 85%, 86%, 87%, 88%, 89%, 90%, 91%, 92%, 93%, 94%, 95%, 96%, 97%, 98%, 99%, or 100% identical to SEQ ID NO: 97. In some embodiments, the deubiquitinase comprises an amino acid sequence at least 80%, 81%, 82%, 83%, 84%, 85%, 86%, 87%, 88%, 89%, 90%, 91%, 92%, 93%, 94%, 95%, 96%, 97%, 98%, 99%, or 100% identical to SEQ ID NO: 98. In some embodiments, the deubiquitinase comprises an amino acid sequence at least 80%, 81%, 82%, 83%, 84%, 85%, 86%, 87%, 88%, 89%, 90%, 91%, 92%, 93%, 94%, 95%, 96%, 97%, 98%, 99%, or 100% identical to SEQ ID NO: 99. In some embodiments, the deubiquitinase comprises an amino acid sequence at least 80%, 81%, 82%, 83%, 84%, 85%, 86%, 87%, 88%, 89%, 90%, 91%, 92%, 93%, 94%, 95%, 96%, 97%, 98%, 99%, or 100% identical to SEQ ID NO: 100. In some embodiments, the deubiquitinase comprises an amino acid sequence at least 80%, 81%, 82%, 83%, 84%, 85%, 86%, 87%, 88%, 89%, 90%, 91%, 92%, 93%, 94%, 95%, 96%, 97%, 98%, 99%, or 100% identical to SEQ ID NO: 101. In some embodiments, the deubiquitinase comprises an amino acid sequence at least 80%, 81%, 82%, 83%, 84%, 85%, 86%, 87%, 88%, 89%, 90%, 91%, 92%, 93%, 94%, 95%, 96%, 97%, 98%, 99%, or 100% identical to SEQ ID NO: 102. In some embodiments, the deubiquitinase comprises an amino acid sequence at least 80%, 81%, 82%, 83%, 84%, 85%, 86%, 87%, 88%, 89%, 90%, 91%, 92%, 93%, 94%, 95%, 96%, 97%, 98%, 99%, or 100% identical to SEQ ID NO: 103. In some embodiments, the deubiquitinase comprises an amino acid sequence at least 80%, 81%, 82%, 83%, 84%, 85%, 86%, 87%, 88%, 89%, 90%, 91%, 92%, 93%, 94%, 95%, 96%, 97%, 98%, 99%, or 100% identical to SEQ ID NO: 104. In some embodiments, the deubiquitinase comprises an amino acid sequence at least 80%, 81%, 82%, 83%, 84%, 85%, 86%, 87%, 88%, 89%, 90%, 91%, 92%, 93%, 94%, 95%, 96%, 97%, 98%, 99%, or 100% identical to SEQ ID NO: 105. In some embodiments, the deubiquitinase comprises an amino acid sequence at least 80%, 81%, 82%, 83%, 84%, 85%, 86%, 87%, 88%, 89%, 90%, 91%, 92%, 93%, 94%, 95%, 96%, 97%, 98%, 99%, or 100% identical to SEQ ID NO: 106. In some embodiments, the deubiquitinase comprises an amino acid sequence at least 80%, 81%, 82%, 83%, 84%, 85%, 86%, 87%, 88%, 89%, 90%, 91%, 92%, 93%, 94%, 95%, 96%, 97%, 98%, 99%, or 100% identical to SEQ ID NO: 107. In some embodiments, the deubiquitinase comprises an amino acid sequence at least 80%, 81%, 82%, 83%, 84%, 85%, 86%, 87%, 88%, 89%, 90%, 91%, 92%, 93%, 94%, 95%, 96%, 97%, 98%, 99%, or 100% identical to SEQ ID NO: 108. In some embodiments, the deubiquitinase comprises an amino acid sequence at least 80%, 81%, 82%, 83%, 84%, 85%, 86%, 87%, 88%, 89%, 90%, 91%, 92%, 93%, 94%, 95%, 96%, 97%, 98%, 99%, or 100% identical to SEQ ID NO: 109. In some embodiments, the deubiquitinase comprises an amino acid sequence at least 80%, 81%, 82%, 83%, 84%, 85%, 86%, 87%, 88%, 89%, 90%, 91%, 92%, 93%, 94%, 95%, 96%, 97%, 98%, 99%, or 100% identical to SEQ ID NO: 110. In some embodiments, the deubiquitinase comprises an amino acid sequence at least 80%, 81%, 82%, 83%, 84%, 85%, 86%, 87%, 88%, 89%, 90%, 91%, 92%, 93%, 94%, 95%, 96%, 97%, 98%, 99%, or 100% identical to SEQ ID NO: 111. In some embodiments, the deubiquitinase comprises an amino acid sequence at least 80%, 81%, 82%, 83%, 84%, 85%, 86%, 87%, 88%, 89%, 90%, 91%, 92%, 93%, 94%, 95%, 96%, 97%, 98%, 99%, or 100% identical to SEQ ID NO: 112.

[0186] In some embodiments, the amino acid sequence of the effector domain comprises an amino acid sequence at least 80%, 81%, 82%, 83%, 84%, 85%, 86%, 87%, 88%, 89%, 90%, 91%, 92%, 93%, 94%, 95%, 96%, 97%, 98%, 99%, or 100% identical to the amino acid sequence of the catalytic domain of any one of SEQ ID NOS: 1-112. In some embodiments, the amino acid sequence of the effector domain consists of an amino acid sequence at least 80%, 81%, 82%, 83%, 84%, 85%, 86%, 87%, 88%, 89%, 90%, 91%, 92%, 93%, 94%, 95%, 96%, 97%, 98%, 99%, or 100% identical to the amino acid sequence of the catalytic domain of any one of SEQ ID NOS: 1-112.

[0187] In some embodiments, the amino acid sequence of the effector domain comprises an amino acid sequence at least 80%, 81%, 82%, 83%, 84%, 85%, 86%, 87%, 88%, 89%, 90%, 91%, 92%, 93%, 94%, 95%, 96%, 97%, 98%, 99%, or 100% identical to the amino acid sequence of the catalytic domain of SEQ ID NO: 1. In some embodiments, the amino acid sequence of the effector domain comprises an amino acid sequence at least 80%, 81%, 82%, 83%, 84%, 85%, 86%, 87%, 88%, 89%, 90%, 91%, 92%, 93%, 94%, 95%, 96%, 97%, 98%, 99%, or 100% identical to the amino acid sequence of the catalytic domain of SEQ ID NO: 2. In some embodiments, the amino acid sequence of the effector domain comprises an amino acid sequence at least 80%, 81%, 82%, 83%, 84%, 85%, 86%, 87%, 88%, 89%, 90%, 91%, 92%, 93%, 94%, 95%, 96%, 97%, 98%, 99%, or 100% identical to the amino acid sequence of the catalytic domain of SEQ ID NO: 3. In some embodiments, the amino acid sequence of the effector domain comprises an amino acid sequence at least 80%, 81%, 82%, 83%, 84%, 85%, 86%, 87%, 88%, 89%, 90%, 91%, 92%, 93%, 94%, 95%, 96%, 97%, 98%, 99%, or 100% identical to the amino acid sequence of the catalytic domain of SEQ ID NO: 4. In some embodiments, the amino acid sequence of the effector domain comprises an amino acid sequence at least 80%, 81%, 82%, 83%, 84%, 85%, 86%, 87%, 88%, 89%, 90%, 91%, 92%, 93%, 94%, 95%, 96%, 97%, 98%, 99%, or 100% identical to the amino acid sequence of the catalytic domain of SEQ ID NO: 5. In some embodiments, the amino acid sequence of the effector domain comprises an amino acid sequence at least 80%, 81%, 82%, 83%, 84%, 85%, 86%, 87%, 88%, 89%, 90%, 91%, 92%, 93%, 94%, 95%, 96%, 97%, 98%, 99%, or 100% identical to the amino acid sequence of the catalytic domain of SEQ ID NO: 6. In some embodiments, the amino acid sequence of the effector domain comprises an amino acid sequence at least 80%, 81%, 82%, 83%, 84%, 85%, 86%, 87%, 88%, 89%, 90%, 91%, 92%, 93%, 94%, 95%, 96%, 97%, 98%, 99%, or 100% identical to the amino acid sequence of the catalytic domain of SEQ ID NO: 7. In some embodiments, the amino acid sequence of the effector domain comprises an amino acid sequence at least 80%, 81%, 82%, 83%, 84%, 85%, 86%, 87%, 88%, 89%, 90%, 91%, 92%, 93%, 94%, 95%, 96%, 97%, 98%, 99%, or 100% identical to the amino acid sequence of the catalytic domain of SEQ ID NO: 8. In some embodiments, the amino acid sequence of the effector domain comprises an amino acid sequence at least 80%, 81%, 82%, 83%, 84%, 85%, 86%, 87%, 88%, 89%, 90%, 91%, 92%, 93%, 94%, 95%, 96%, 97%, 98%, 99%, or 100% identical to the amino acid sequence of the catalytic domain of SEQ ID NO: 9. In some embodiments, the amino acid sequence of the effector domain comprises an amino acid sequence at least 80%, 81%, 82%, 83%, 84%, 85%, 86%, 87%, 88%, 89%, 90%, 91%, 92%, 93%, 94%, 95%, 96%, 97%, 98%, 99%, or 100% identical to the amino acid sequence of the catalytic domain of SEQ ID NO: 10. In some embodiments, the amino acid sequence of the effector domain comprises an amino acid sequence at least 80%, 81%, 82%, 83%, 84%, 85%, 86%, 87%, 88%, 89%, 90%, 91%, 92%, 93%, 94%, 95%, 96%, 97%, 98%, 99%, or 100% identical to the amino acid sequence of the catalytic domain of SEQ ID NO: 11. In some embodiments, the amino acid sequence of the effector domain comprises an amino acid sequence at least 80%, 81%, 82%, 83%, 84%, 85%, 86%, 87%, 88%, 89%, 90%, 91%, 92%, 93%, 94%, 95%, 96%, 97%, 98%, 99%, or 100% identical to the amino acid sequence of the catalytic domain of SEQ ID NO: 12. In some embodiments, the amino acid sequence of the effector domain comprises an amino acid sequence at least 80%, 81%, 82%, 83%, 84%, 85%, 86%, 87%, 88%, 89%, 90%, 91%, 92%, 93%, 94%, 95%, 96%, 97%, 98%, 99%, or 100% identical to the amino acid sequence of the catalytic domain of SEQ ID NO: 13. In some embodiments, the amino acid sequence of the effector domain comprises an amino acid sequence at least 80%, 81%, 82%, 83%, 84%, 85%, 86%, 87%, 88%, 89%, 90%, 91%, 92%, 93%, 94%, 95%, 96%, 97%, 98%, 99%, or 100% identical to the amino acid sequence of the catalytic domain of SEQ ID NO: 14. In some embodiments, the amino acid sequence of the effector domain comprises an amino acid sequence at least 80%, 81%, 82%, 83%, 84%, 85%, 86%, 87%, 88%, 89%, 90%, 91%, 92%, 93%, 94%, 95%, 96%, 97%, 98%, 99%, or 100% identical to the amino acid sequence of the catalytic domain of SEQ ID NO: 15. In some embodiments, the amino acid sequence of the effector domain comprises an amino acid sequence at least 80%, 81%, 82%, 83%, 84%, 85%, 86%, 87%, 88%, 89%, 90%, 91%, 92%, 93%, 94%, 95%, 96%, 97%, 98%, 99%, or 100% identical to the amino acid sequence of the catalytic domain of SEQ ID NO: 16. In some embodiments, the amino acid sequence of the effector domain comprises an amino acid sequence at least 80%, 81%, 82%, 83%, 84%, 85%, 86%, 87%, 88%, 89%, 90%, 91%, 92%, 93%, 94%, 95%, 96%, 97%, 98%, 99%, or 100% identical to the amino acid sequence of the catalytic domain of SEQ ID NO: 17. In some embodiments, the amino acid sequence of the effector domain comprises an amino acid sequence at least 80%, 81%, 82%, 83%, 84%, 85%, 86%, 87%, 88%, 89%, 90%, 91%, 92%, 93%, 94%, 95%, 96%, 97%, 98%, 99%, or 100% identical to the amino acid sequence of the catalytic domain of SEQ ID NO: 18. In some embodiments, the amino acid sequence of the effector domain comprises an amino acid sequence at least 80%, 81%, 82%, 83%, 84%, 85%, 86%, 87%, 88%, 89%, 90%, 91%, 92%, 93%, 94%, 95%, 96%, 97%, 98%, 99%, or 100% identical to the amino acid sequence of the catalytic domain of SEQ ID NO: 19. In some embodiments, the amino acid sequence of the effector domain comprises an amino acid sequence at least 80%, 81%, 82%, 83%, 84%, 85%, 86%, 87%, 88%, 89%, 90%, 91%, 92%, 93%, 94%, 95%, 96%, 97%, 98%, 99%, or 100% identical to the amino acid sequence of the catalytic domain of SEQ ID NO: 20. In some embodiments, the amino acid sequence of the effector domain comprises an amino acid sequence at least 80%, 81%, 82%, 83%, 84%, 85%, 86%, 87%, 88%, 89%, 90%, 91%, 92%, 93%, 94%, 95%, 96%, 97%, 98%, 99%, or 100% identical to the amino acid sequence of the catalytic domain of SEQ ID NO: 21. In some embodiments, the amino acid sequence of the effector domain comprises an amino acid sequence at least 80%, 81%, 82%, 83%, 84%, 85%, 86%, 87%, 88%, 89%, 90%, 91%, 92%, 93%, 94%, 95%, 96%, 97%, 98%, 99%, or 100% identical to the amino acid sequence of the catalytic domain of SEQ ID NO: 22. In some embodiments, the amino acid sequence of the effector domain comprises an amino acid sequence at least 80%, 81%, 82%, 83%, 84%, 85%, 86%, 87%, 88%, 89%, 90%, 91%, 92%, 93%, 94%, 95%, 96%, 97%, 98%, 99%, or 100% identical to the amino acid sequence of the catalytic domain of SEQ ID NO: 23. In some embodiments, the amino acid sequence of the effector domain comprises an amino acid sequence at least 80%, 81%, 82%, 83%, 84%, 85%, 86%, 87%, 88%, 89%, 90%, 91%, 92%, 93%, 94%, 95%, 96%, 97%, 98%, 99%, or 100% identical to the amino acid sequence of the catalytic domain of SEQ ID NO: 24. In some embodiments, the amino acid sequence of the effector domain comprises an amino acid sequence at least 80%, 81%, 82%, 83%, 84%, 85%, 86%, 87%, 88%, 89%, 90%, 91%, 92%, 93%, 94%, 95%, 96%, 97%, 98%, 99%, or 100% identical to the amino acid sequence of the catalytic domain of SEQ ID NO: 25. In some embodiments, the amino acid sequence of the effector domain comprises an amino acid sequence at least 80%, 81%, 82%, 83%, 84%, 85%, 86%, 87%, 88%, 89%, 90%, 91%, 92%, 93%, 94%, 95%, 96%, 97%, 98%, 99%, or 100% identical to the amino acid sequence of the catalytic domain of SEQ ID NO: 26. In some embodiments, the amino acid sequence of the effector domain comprises an amino acid sequence at least 80%, 81%, 82%, 83%, 84%, 85%, 86%, 87%, 88%, 89%, 90%, 91%, 92%, 93%, 94%, 95%, 96%, 97%, 98%, 99%, or 100% identical to the amino acid sequence of the catalytic domain of SEQ ID NO: 27. In some embodiments, the amino acid sequence of the effector domain comprises an amino acid sequence at least 80%, 81%, 82%, 83%, 84%, 85%, 86%, 87%, 88%, 89%, 90%, 91%, 92%, 93%, 94%, 95%, 96%, 97%, 98%, 99%, or 100% identical to the amino acid sequence of the catalytic domain of SEQ ID NO: 28. In some embodiments, the amino acid sequence of the effector domain comprises an amino acid sequence at least 80%, 81%, 82%, 83%, 84%, 85%, 86%, 87%, 88%, 89%, 90%, 91%, 92%, 93%, 94%, 95%, 96%, 97%, 98%, 99%, or 100% identical to the amino acid sequence of the catalytic domain of SEQ ID NO: 29. In some embodiments, the amino acid sequence of the effector domain comprises an amino acid sequence at least 80%, 81%, 82%, 83%, 84%, 85%, 86%, 87%, 88%, 89%, 90%, 91%, 92%, 93%, 94%, 95%, 96%, 97%, 98%, 99%, or 100% identical to the amino acid sequence of the catalytic domain of SEQ ID NO: 30. In some embodiments, the amino acid sequence of the effector domain comprises an amino acid sequence at least 80%, 81%, 82%, 83%, 84%, 85%, 86%, 87%, 88%, 89%, 90%, 91%, 92%, 93%, 94%, 95%, 96%, 97%, 98%, 99%, or 100% identical to the amino acid sequence of the catalytic domain of SEQ ID NO: 31. In some embodiments, the amino acid sequence of the effector domain comprises an amino acid sequence at least 80%, 81%, 82%, 83%, 84%, 85%, 86%, 87%, 88%, 89%, 90%, 91%, 92%, 93%, 94%, 95%, 96%, 97%, 98%, 99%, or 100% identical to the amino acid sequence of the catalytic domain of SEQ ID NO: 32. In some embodiments, the amino acid sequence of the effector domain comprises an amino acid sequence at least 80%, 81%, 82%, 83%, 84%, 85%, 86%, 87%, 88%, 89%, 90%, 91%, 92%, 93%, 94%, 95%, 96%, 97%, 98%, 99%, or 100% identical to the amino acid sequence of the catalytic domain of SEQ ID NO: 33. In some embodiments, the amino acid sequence of the effector domain comprises an amino acid sequence at least 80%, 81%, 82%, 83%, 84%, 85%, 86%, 87%, 88%, 89%, 90%, 91%, 92%, 93%, 94%, 95%, 96%, 97%, 98%, 99%, or 100% identical to the amino acid sequence of the catalytic domain of SEQ ID NO: 34. In some embodiments, the amino acid sequence of the effector domain comprises an amino acid sequence at least 80%, 81%, 82%, 83%, 84%, 85%, 86%, 87%, 88%, 89%, 90%, 91%, 92%, 93%, 94%, 95%, 96%, 97%, 98%, 99%, or 100% identical to the amino acid sequence of the catalytic domain of SEQ ID NO: 35. In some embodiments, the amino acid sequence of the effector domain comprises an amino acid sequence at least 80%, 81%, 82%, 83%, 84%, 85%, 86%, 87%, 88%, 89%, 90%, 91%, 92%, 93%, 94%, 95%, 96%, 97%, 98%, 99%, or 100% identical to the amino acid sequence of the catalytic domain of SEQ ID NO: 36. In some embodiments, the amino acid sequence of the effector domain comprises an amino acid sequence at least 80%, 81%, 82%, 83%, 84%, 85%, 86%, 87%, 88%, 89%, 90%, 91%, 92%, 93%, 94%, 95%, 96%, 97%, 98%, 99%, or 100% identical to the amino acid sequence of the catalytic domain of SEQ ID NO: 37. In some embodiments, the amino acid sequence of the effector domain comprises an amino acid sequence at least 80%, 81%, 82%, 83%, 84%, 85%, 86%, 87%, 88%, 89%, 90%, 91%, 92%, 93%, 94%, 95%, 96%, 97%, 98%, 99%, or 100% identical to the amino acid sequence of the catalytic domain of SEQ ID NO: 38. In some embodiments, the amino acid sequence of the effector domain comprises an amino acid sequence at least 80%, 81%, 82%, 83%, 84%, 85%, 86%, 87%, 88%, 89%, 90%, 91%, 92%, 93%, 94%, 95%, 96%, 97%, 98%, 99%, or 100% identical to the amino acid sequence of the catalytic domain of SEQ ID NO: 39. In some embodiments, the amino acid sequence of the effector domain comprises an amino acid sequence at least 80%, 81%, 82%, 83%, 84%, 85%, 86%, 87%, 88%, 89%, 90%, 91%, 92%, 93%, 94%, 95%, 96%, 97%, 98%, 99%, or 100% identical to the amino acid sequence of the catalytic domain of SEQ ID NO: 40. In some embodiments, the amino acid sequence of the effector domain comprises an amino acid sequence at least 80%, 81%, 82%, 83%, 84%, 85%, 86%, 87%, 88%, 89%, 90%, 91%, 92%, 93%, 94%, 95%, 96%, 97%, 98%, 99%, or 100% identical to the amino acid sequence of the catalytic domain of SEQ ID NO: 41. In some embodiments, the amino acid sequence of the effector domain comprises an amino acid sequence at least 80%, 81%, 82%, 83%, 84%, 85%, 86%, 87%, 88%, 89%, 90%, 91%, 92%, 93%, 94%, 95%, 96%, 97%, 98%, 99%, or 100% identical to the amino acid sequence of the catalytic domain of SEQ ID NO: 42. In some embodiments, the amino acid sequence of the effector domain comprises an amino acid sequence at least 80%, 81%, 82%, 83%, 84%, 85%, 86%, 87%, 88%, 89%, 90%, 91%, 92%, 93%, 94%, 95%, 96%, 97%, 98%, 99%, or 100% identical to the amino acid sequence of the catalytic domain of SEQ ID NO: 43. In some embodiments, the amino acid sequence of the effector domain comprises an amino acid sequence at least 80%, 81%, 82%, 83%, 84%, 85%, 86%, 87%, 88%, 89%, 90%, 91%, 92%, 93%, 94%, 95%, 96%, 97%, 98%, 99%, or 100% identical to the amino acid sequence of the catalytic domain of SEQ ID NO: 44. In some embodiments, the amino acid sequence of the effector domain comprises an amino acid sequence at least 80%, 81%, 82%, 83%, 84%, 85%, 86%, 87%, 88%, 89%, 90%, 91%, 92%, 93%, 94%, 95%, 96%, 97%, 98%, 99%, or 100% identical to the amino acid sequence of the catalytic domain of SEQ ID NO: 45. In some embodiments, the amino acid sequence of the effector domain comprises an amino acid sequence at least 80%, 81%, 82%, 83%, 84%, 85%, 86%, 87%, 88%, 89%, 90%, 91%, 92%, 93%, 94%, 95%, 96%, 97%, 98%, 99%, or 100% identical to the amino acid sequence of the catalytic domain of SEQ ID NO: 46. In some embodiments, the amino acid sequence of the effector domain comprises an amino acid sequence at least 80%, 81%, 82%, 83%, 84%, 85%, 86%, 87%, 88%, 89%, 90%, 91%, 92%, 93%, 94%, 95%, 96%, 97%, 98%, 99%, or 100% identical to the amino acid sequence of the catalytic domain of SEQ ID NO: 47. In some embodiments, the amino acid sequence of the effector domain comprises an amino acid sequence at least 80%, 81%, 82%, 83%, 84%, 85%, 86%, 87%, 88%, 89%, 90%, 91%, 92%, 93%, 94%, 95%, 96%, 97%, 98%, 99%, or 100% identical to the amino acid sequence of the catalytic domain of SEQ ID NO: 48. In some embodiments, the amino acid sequence of the effector domain comprises an amino acid sequence at least 80%, 81%, 82%, 83%, 84%, 85%, 86%, 87%, 88%, 89%, 90%, 91%, 92%, 93%, 94%, 95%, 96%, 97%, 98%, 99%, or 100% identical to the amino acid sequence of the catalytic domain of SEQ ID NO: 49. In some embodiments, the amino acid sequence of the effector domain comprises an amino acid sequence at least 80%, 81%, 82%, 83%, 84%, 85%, 86%, 87%, 88%, 89%, 90%, 91%, 92%, 93%, 94%, 95%, 96%, 97%, 98%, 99%, or 100% identical to the amino acid sequence of the catalytic domain of SEQ ID NO: 50. In some embodiments, the amino acid sequence of the effector domain comprises an amino acid sequence at least 80%, 81%, 82%, 83%, 84%, 85%, 86%, 87%, 88%, 89%, 90%, 91%, 92%, 93%, 94%, 95%, 96%, 97%, 98%, 99%, or 100% identical to the amino acid sequence of the catalytic domain of SEQ ID NO: 51. In some embodiments, the amino acid sequence of the effector domain comprises an amino acid sequence at least 80%, 81%, 82%, 83%, 84%, 85%, 86%, 87%, 88%, 89%, 90%, 91%, 92%, 93%, 94%, 95%, 96%, 97%, 98%, 99%, or 100% identical to the amino acid sequence of the catalytic domain of SEQ ID NO: 52. In some embodiments, the amino acid sequence of the effector domain comprises an amino acid sequence at least 80%, 81%, 82%, 83%, 84%, 85%, 86%, 87%, 88%, 89%, 90%, 91%, 92%, 93%, 94%, 95%, 96%, 97%, 98%, 99%, or 100% identical to the amino acid sequence of the catalytic domain of SEQ ID NO: 53. In some embodiments, the amino acid sequence of the effector domain comprises an amino acid sequence at least 80%, 81%, 82%, 83%, 84%, 85%, 86%, 87%, 88%, 89%, 90%, 91%, 92%, 93%, 94%, 95%, 96%, 97%, 98%, 99%, or 100% identical to the amino acid sequence of the catalytic domain of SEQ ID NO: 54. In some embodiments, the amino acid sequence of the effector domain comprises an amino acid sequence at least 80%, 81%, 82%, 83%, 84%, 85%, 86%, 87%, 88%, 89%, 90%, 91%, 92%, 93%, 94%, 95%, 96%, 97%, 98%, 99%, or 100% identical to the amino acid sequence of the catalytic domain of SEQ ID NO: 55. In some embodiments, the amino acid sequence of the effector domain comprises an amino acid sequence at least 80%, 81%, 82%, 83%, 84%, 85%, 86%, 87%, 88%, 89%, 90%, 91%, 92%, 93%, 94%, 95%, 96%, 97%, 98%, 99%, or 100% identical to the amino acid sequence of the catalytic domain of SEQ ID NO: 56. In some embodiments, the amino acid sequence of the effector domain comprises an amino acid sequence at least 80%, 81%, 82%, 83%, 84%, 85%, 86%, 87%, 88%, 89%, 90%, 91%, 92%, 93%, 94%, 95%, 96%, 97%, 98%, 99%, or 100% identical to the amino acid sequence of the catalytic domain of SEQ ID NO: 57. In some embodiments, the amino acid sequence of the effector domain comprises an amino acid sequence at least 80%, 81%, 82%, 83%, 84%, 85%, 86%, 87%, 88%, 89%, 90%, 91%, 92%, 93%, 94%, 95%, 96%, 97%, 98%, 99%, or 100% identical to the amino acid sequence of the catalytic domain of SEQ ID NO: 58. In some embodiments, the amino acid sequence of the effector domain comprises an amino acid sequence at least 80%, 81%, 82%, 83%, 84%, 85%, 86%, 87%, 88%, 89%, 90%, 91%, 92%, 93%, 94%, 95%, 96%, 97%, 98%, 99%, or 100% identical to the amino acid sequence of the catalytic domain of SEQ ID NO: 59. In some embodiments, the amino acid sequence of the effector domain comprises an amino acid sequence at least 80%, 81%, 82%, 83%, 84%, 85%, 86%, 87%, 88%, 89%, 90%, 91%, 92%, 93%, 94%, 95%, 96%, 97%, 98%, 99%, or 100% identical to the amino acid sequence of the catalytic domain of SEQ ID NO: 60. In some embodiments, the amino acid sequence of the effector domain comprises an amino acid sequence at least 80%, 81%, 82%, 83%, 84%, 85%, 86%, 87%, 88%, 89%, 90%, 91%, 92%, 93%, 94%, 95%, 96%, 97%, 98%, 99%, or 100% identical to the amino acid sequence of the catalytic domain of SEQ ID NO: 61. In some embodiments, the amino acid sequence of the effector domain comprises an amino acid sequence at least 80%, 81%, 82%, 83%, 84%, 85%, 86%, 87%, 88%, 89%, 90%, 91%, 92%, 93%, 94%, 95%, 96%, 97%, 98%, 99%, or 100% identical to the amino acid sequence of the catalytic domain of SEQ ID NO: 62. In some embodiments, the amino acid sequence of the effector domain comprises an amino acid sequence at least 80%, 81%, 82%, 83%, 84%, 85%, 86%, 87%, 88%, 89%, 90%, 91%, 92%, 93%, 94%, 95%, 96%, 97%, 98%, 99%, or 100% identical to the amino acid sequence of the catalytic domain of SEQ ID NO: 63. In some embodiments, the amino acid sequence of the effector domain comprises an amino acid sequence at least 80%, 81%, 82%, 83%, 84%, 85%, 86%, 87%, 88%, 89%, 90%, 91%, 92%, 93%, 94%, 95%, 96%, 97%, 98%, 99%, or 100% identical to the amino acid sequence of the catalytic domain of SEQ ID NO: 64. In some embodiments, the amino acid sequence of the effector domain comprises an amino acid sequence at least 80%, 81%, 82%, 83%, 84%, 85%, 86%, 87%, 88%, 89%, 90%, 91%, 92%, 93%, 94%, 95%, 96%, 97%, 98%, 99%, or 100% identical to the amino acid sequence of the catalytic domain of SEQ ID NO: 65. In some embodiments, the amino acid sequence of the effector domain comprises an amino acid sequence at least 80%, 81%, 82%, 83%, 84%, 85%, 86%, 87%, 88%, 89%, 90%, 91%, 92%, 93%, 94%, 95%, 96%, 97%, 98%, 99%, or 100% identical to the amino acid sequence of the catalytic domain of SEQ ID NO: 66. In some embodiments, the amino acid sequence of the effector domain comprises an amino acid sequence at least 80%, 81%, 82%, 83%, 84%, 85%, 86%, 87%, 88%, 89%, 90%, 91%, 92%, 93%, 94%, 95%, 96%, 97%, 98%, 99%, or 100% identical to the amino acid sequence of the catalytic domain of SEQ ID NO: 67. In some embodiments, the amino acid sequence of the effector domain comprises an amino acid sequence at least 80%, 81%, 82%, 83%, 84%, 85%, 86%, 87%, 88%, 89%, 90%, 91%, 92%, 93%, 94%, 95%, 96%, 97%, 98%, 99%, or 100% identical to the amino acid sequence of the catalytic domain of SEQ ID NO: 68. In some embodiments, the amino acid sequence of the effector domain comprises an amino acid sequence at least 80%, 81%, 82%, 83%, 84%, 85%, 86%, 87%, 88%, 89%, 90%, 91%, 92%, 93%, 94%, 95%, 96%, 97%, 98%, 99%, or 100% identical to the amino acid sequence of the catalytic domain of SEQ ID NO: 69. In some embodiments, the amino acid sequence of the effector domain comprises an amino acid sequence at least 80%, 81%, 82%, 83%, 84%, 85%, 86%, 87%, 88%, 89%, 90%, 91%, 92%, 93%, 94%, 95%, 96%, 97%, 98%, 99%, or 100% identical to the amino acid sequence of the catalytic domain of SEQ ID NO: 70. In some embodiments, the amino acid sequence of the effector domain comprises an amino acid sequence at least 80%, 81%, 82%, 83%, 84%, 85%, 86%, 87%, 88%, 89%, 90%, 91%, 92%, 93%, 94%, 95%, 96%, 97%, 98%, 99%, or 100% identical to the amino acid sequence of the catalytic domain of SEQ ID NO: 71. In some embodiments, the amino acid sequence of the effector domain comprises an amino acid sequence at least 80%, 81%, 82%, 83%, 84%, 85%, 86%, 87%, 88%, 89%, 90%, 91%, 92%, 93%, 94%, 95%, 96%, 97%, 98%, 99%, or 100% identical to the amino acid sequence of the catalytic domain of SEQ ID NO: 72. In some embodiments, the amino acid sequence of the effector domain comprises an amino acid sequence at least 80%, 81%, 82%, 83%, 84%, 85%, 86%, 87%, 88%, 89%, 90%, 91%, 92%, 93%, 94%, 95%, 96%, 97%, 98%, 99%, or 100% identical to the amino acid sequence of the catalytic domain of SEQ ID NO: 73. In some embodiments, the amino acid sequence of the effector domain comprises an amino acid sequence at least 80%, 81%, 82%, 83%, 84%, 85%, 86%, 87%, 88%, 89%, 90%, 91%, 92%, 93%, 94%, 95%, 96%, 97%, 98%, 99%, or 100% identical to the amino acid sequence of the catalytic domain of SEQ ID NO: 74. In some embodiments, the amino acid sequence of the effector domain comprises an amino acid sequence at least 80%, 81%, 82%, 83%, 84%, 85%, 86%, 87%, 88%, 89%, 90%, 91%, 92%, 93%, 94%, 95%, 96%, 97%, 98%, 99%, or 100% identical to the amino acid sequence of the catalytic domain of SEQ ID NO: 75. In some embodiments, the amino acid sequence of the effector domain comprises an amino acid sequence at least 80%, 81%, 82%, 83%, 84%, 85%, 86%, 87%, 88%, 89%, 90%, 91%, 92%, 93%, 94%, 95%, 96%, 97%, 98%, 99%, or 100% identical to the amino acid sequence of the catalytic domain of SEQ ID NO: 76. In some embodiments, the amino acid sequence of the effector domain comprises an amino acid sequence at least 80%, 81%, 82%, 83%, 84%, 85%, 86%, 87%, 88%, 89%, 90%, 91%, 92%, 93%, 94%, 95%, 96%, 97%, 98%, 99%, or 100% identical to the amino acid sequence of the catalytic domain of SEQ ID NO: 77. In some embodiments, the amino acid sequence of the effector domain comprises an amino acid sequence at least 80%, 81%, 82%, 83%, 84%, 85%, 86%, 87%, 88%, 89%, 90%, 91%, 92%, 93%, 94%, 95%, 96%, 97%, 98%, 99%, or 100% identical to the amino acid sequence of the catalytic domain of SEQ ID NO: 78. In some embodiments, the amino acid sequence of the effector domain comprises an amino acid sequence at least 80%, 81%, 82%, 83%, 84%, 85%, 86%, 87%, 88%, 89%, 90%, 91%, 92%, 93%, 94%, 95%, 96%, 97%, 98%, 99%, or 100% identical to the amino acid sequence of the catalytic domain of SEQ ID NO: 79. In some embodiments, the amino acid sequence of the effector domain comprises an amino acid sequence at least 80%, 81%, 82%, 83%, 84%, 85%, 86%, 87%, 88%, 89%, 90%, 91%, 92%, 93%, 94%, 95%, 96%, 97%, 98%, 99%, or 100% identical to the amino acid sequence of the catalytic domain of SEQ ID NO: 80. In some embodiments, the amino acid sequence of the effector domain comprises an amino acid sequence at least 80%, 81%, 82%, 83%, 84%, 85%, 86%, 87%, 88%, 89%, 90%, 91%, 92%, 93%, 94%, 95%, 96%, 97%, 98%, 99%, or 100% identical to the amino acid sequence of the catalytic domain of SEQ ID NO: 81. In some embodiments, the amino acid sequence of the effector domain comprises an amino acid sequence at least 80%, 81%, 82%, 83%, 84%, 85%, 86%, 87%, 88%, 89%, 90%, 91%, 92%, 93%, 94%, 95%, 96%, 97%, 98%, 99%, or 100% identical to the amino acid sequence of the catalytic domain of SEQ ID NO: 82. In some embodiments, the amino acid sequence of the effector domain comprises an amino acid sequence at least 80%, 81%, 82%, 83%, 84%, 85%, 86%, 87%, 88%, 89%, 90%, 91%, 92%, 93%, 94%, 95%, 96%, 97%, 98%, 99%, or 100% identical to the amino acid sequence of the catalytic domain of SEQ ID NO: 83. In some embodiments, the amino acid sequence of the effector domain comprises an amino acid sequence at least 80%, 81%, 82%, 83%, 84%, 85%, 86%, 87%, 88%, 89%, 90%, 91%, 92%, 93%, 94%, 95%, 96%, 97%, 98%, 99%, or 100% identical to the amino acid sequence of the catalytic domain of SEQ ID NO: 84. In some embodiments, the amino acid sequence of the effector domain comprises an amino acid sequence at least 80%, 81%, 82%, 83%, 84%, 85%, 86%, 87%, 88%, 89%, 90%, 91%, 92%, 93%, 94%, 95%, 96%, 97%, 98%, 99%, or 100% identical to the amino acid sequence of the catalytic domain of SEQ ID NO: 85. In some embodiments, the amino acid sequence of the effector domain comprises an amino acid sequence at least 80%, 81%, 82%, 83%, 84%, 85%, 86%, 87%, 88%, 89%, 90%, 91%, 92%, 93%, 94%, 95%, 96%, 97%, 98%, 99%, or 100% identical to the amino acid sequence of the catalytic domain of SEQ ID NO: 86. In some embodiments, the amino acid sequence of the effector domain comprises an amino acid sequence at least 80%, 81%, 82%, 83%, 84%, 85%, 86%, 87%, 88%, 89%, 90%, 91%, 92%, 93%, 94%, 95%, 96%, 97%, 98%, 99%, or 100% identical to the amino acid sequence of the catalytic domain of SEQ ID NO: 87. In some embodiments, the amino acid sequence of the effector domain comprises an amino acid sequence at least 80%, 81%, 82%, 83%, 84%, 85%, 86%, 87%, 88%, 89%, 90%, 91%, 92%, 93%, 94%, 95%, 96%, 97%, 98%, 99%, or 100% identical to the amino acid sequence of the catalytic domain of SEQ ID NO: 88. In some embodiments, the amino acid sequence of the effector domain comprises an amino acid sequence at least 80%, 81%, 82%, 83%, 84%, 85%, 86%, 87%, 88%, 89%, 90%, 91%, 92%, 93%, 94%, 95%, 96%, 97%, 98%, 99%, or 100% identical to the amino acid sequence of the catalytic domain of SEQ ID NO: 89. In some embodiments, the amino acid sequence of the effector domain comprises an amino acid sequence at least 80%, 81%, 82%, 83%, 84%, 85%, 86%, 87%, 88%, 89%, 90%, 91%, 92%, 93%, 94%, 95%, 96%, 97%, 98%, 99%, or 100% identical to the amino acid sequence of the catalytic domain of SEQ ID NO: 90. In some embodiments, the amino acid sequence of the effector domain comprises an amino acid sequence at least 80%, 81%, 82%, 83%, 84%, 85%, 86%, 87%, 88%, 89%, 90%, 91%, 92%, 93%, 94%, 95%, 96%, 97%, 98%, 99%, or 100% identical to the amino acid sequence of the catalytic domain of SEQ ID NO: 91. In some embodiments, the amino acid sequence of the effector domain comprises an amino acid sequence at least 80%, 81%, 82%, 83%, 84%, 85%, 86%, 87%, 88%, 89%, 90%, 91%, 92%, 93%, 94%, 95%, 96%, 97%, 98%, 99%, or 100% identical to the amino acid sequence of the catalytic domain of SEQ ID NO: 92. In some embodiments, the amino acid sequence of the effector domain comprises an amino acid sequence at least 80%, 81%, 82%, 83%, 84%, 85%, 86%, 87%, 88%, 89%, 90%, 91%, 92%, 93%, 94%, 95%, 96%, 97%, 98%, 99%, or 100% identical to the amino acid sequence of the catalytic domain of SEQ ID NO: 93. In some embodiments, the amino acid sequence of the effector domain comprises an amino acid sequence at least 80%, 81%, 82%, 83%, 84%, 85%, 86%, 87%, 88%, 89%, 90%, 91%, 92%, 93%, 94%, 95%, 96%, 97%, 98%, 99%, or 100% identical to the amino acid sequence of the catalytic domain of SEQ ID NO: 94. In some embodiments, the amino acid sequence of the effector domain comprises an amino acid sequence at least 80%, 81%, 82%, 83%, 84%, 85%, 86%, 87%, 88%, 89%, 90%, 91%, 92%, 93%, 94%, 95%, 96%, 97%, 98%, 99%, or 100% identical to the amino acid sequence of the catalytic domain of SEQ ID NO: 95. In some embodiments, the amino acid sequence of the effector domain comprises an amino acid sequence at least 80%, 81%, 82%, 83%, 84%, 85%, 86%, 87%, 88%, 89%, 90%, 91%, 92%, 93%, 94%, 95%, 96%, 97%, 98%, 99%, or 100% identical to the amino acid sequence of the catalytic domain of SEQ ID NO: 96. In some embodiments, the amino acid sequence of the effector domain comprises an amino acid sequence at least 80%, 81%, 82%, 83%, 84%, 85%, 86%, 87%, 88%, 89%, 90%, 91%, 92%, 93%, 94%, 95%, 96%, 97%, 98%, 99%, or 100% identical to the amino acid sequence of the catalytic domain of SEQ ID NO: 97. In some embodiments, the amino acid sequence of the effector domain comprises an amino acid sequence at least 80%, 81%, 82%, 83%, 84%, 85%, 86%, 87%, 88%, 89%, 90%, 91%, 92%, 93%, 94%, 95%, 96%, 97%, 98%, 99%, or 100% identical to the amino acid sequence of the catalytic domain of SEQ ID NO: 98. In some embodiments, the amino acid sequence of the effector domain comprises an amino acid sequence at least 80%, 81%, 82%, 83%, 84%, 85%, 86%, 87%, 88%, 89%, 90%, 91%, 92%, 93%, 94%, 95%, 96%, 97%, 98%, 99%, or 100% identical to the amino acid sequence of the catalytic domain of SEQ ID NO: 99. In some embodiments, the amino acid sequence of the effector domain comprises an amino acid sequence at least 80%, 81%, 82%, 83%, 84%, 85%, 86%, 87%, 88%, 89%, 90%, 91%, 92%, 93%, 94%, 95%, 96%, 97%, 98%, 99%, or 100% identical to the amino acid sequence of the catalytic domain of SEQ ID NO: 100. In some embodiments, the amino acid sequence of the effector domain comprises an amino acid sequence at least 80%, 81%, 82%, 83%, 84%, 85%, 86%, 87%, 88%, 89%, 90%, 91%, 92%, 93%, 94%, 95%, 96%, 97%, 98%, 99%, or 100% identical to the amino acid sequence of the catalytic domain of SEQ ID NO: 101. In some embodiments, the amino acid sequence of the effector domain comprises an amino acid sequence at least 80%, 81%, 82%, 83%, 84%, 85%, 86%, 87%, 88%, 89%, 90%, 91%, 92%, 93%, 94%, 95%, 96%, 97%, 98%, 99%, or 100% identical to the amino acid sequence of the catalytic domain of SEQ ID NO: 102. In some embodiments, the amino acid sequence of the effector domain comprises an amino acid sequence at least 80%, 81%, 82%, 83%, 84%, 85%, 86%, 87%, 88%, 89%, 90%, 91%, 92%, 93%, 94%, 95%, 96%, 97%, 98%, 99%, or 100% identical to the amino acid sequence of the catalytic domain of SEQ ID NO: 103. In some embodiments, the amino acid sequence of the effector domain comprises an amino acid sequence at least 80%, 81%, 82%, 83%, 84%, 85%, 86%, 87%, 88%, 89%, 90%, 91%, 92%, 93%, 94%, 95%, 96%, 97%, 98%, 99%, or 100% identical to the amino acid sequence of the catalytic domain of SEQ ID NO: 104. In some embodiments, the amino acid sequence of the effector domain comprises an amino acid sequence at least 80%, 81%, 82%, 83%, 84%, 85%, 86%, 87%, 88%, 89%, 90%, 91%, 92%, 93%, 94%, 95%, 96%, 97%, 98%, 99%, or 100% identical to the amino acid sequence of the catalytic domain of SEQ ID NO: 105. In some embodiments, the amino acid sequence of the effector domain comprises an amino acid sequence at least 80%, 81%, 82%, 83%, 84%, 85%, 86%, 87%, 88%, 89%, 90%, 91%, 92%, 93%, 94%, 95%, 96%, 97%, 98%, 99%, or 100% identical to the amino acid sequence of the catalytic domain of SEQ ID NO: 106. In some embodiments, the amino acid sequence of the effector domain comprises an amino acid sequence at least 80%, 81%, 82%, 83%, 84%, 85%, 86%, 87%, 88%, 89%, 90%, 91%, 92%, 93%, 94%, 95%, 96%, 97%, 98%, 99%, or 100% identical to the amino acid sequence of the catalytic domain of SEQ ID NO: 107. In some embodiments, the amino acid sequence of the effector domain comprises an amino acid sequence at least 80%, 81%, 82%, 83%, 84%, 85%, 86%, 87%, 88%, 89%, 90%, 91%, 92%, 93%, 94%, 95%, 96%, 97%, 98%, 99%, or 100% identical to the amino acid sequence of the catalytic domain of SEQ ID NO: 108. In some embodiments, the amino acid sequence of the effector domain comprises an amino acid sequence at least 80%, 81%, 82%, 83%, 84%, 85%, 86%, 87%, 88%, 89%, 90%, 91%, 92%, 93%, 94%, 95%, 96%, 97%, 98%, 99%, or 100% identical to the amino acid sequence of the catalytic domain of SEQ ID NO: 109. In some embodiments, the amino acid sequence of the effector domain comprises an amino acid sequence at least 80%, 81%, 82%, 83%, 84%, 85%, 86%, 87%, 88%, 89%, 90%, 91%, 92%, 93%, 94%, 95%, 96%, 97%, 98%, 99%, or 100% identical to the amino acid sequence of the catalytic domain of SEQ ID NO: 110. In some embodiments, the amino acid sequence of the effector domain comprises an amino acid sequence at least 80%, 81%, 82%, 83%, 84%, 85%, 86%, 87%, 88%, 89%, 90%, 91%, 92%, 93%, 94%, 95%, 96%, 97%, 98%, 99%, or 100% identical to the amino acid sequence of the catalytic domain of SEQ ID NO: 111. In some embodiments, the amino acid sequence of the effector domain comprises an amino acid sequence at least 80%, 81%, 82%, 83%, 84%, 85%, 86%, 87%, 88%, 89%, 90%, 91%, 92%, 93%, 94%, 95%, 96%, 97%, 98%, 99%, or 100% identical to the amino acid sequence of the catalytic domain of SEQ ID NO: 112.

[0188] In some embodiments, the catalytic domain is derived from a deubiquitinase that comprises an amino acid sequence at least 80%, 81%, 82%, 83%, 84%, 85%, 86%, 87%, 88%, 89%, 90%, 91%, 92%, 93%, 94%, 95%, 96%, 97%, 98%, 99%, or 100% identical to the amino acid sequence of any one of SEQ ID NOS: 1-112. In some embodiments, the catalytic domain is derived from a deubiquitinase that consists of an amino acid sequence at least 80%, 81%, 82%, 83%, 84%, 85%, 86%, 87%, 88%, 89%, 90%, 91%, 92%, 93%, 94%, 95%, 96%, 97%, 98%, 99%, or 100% identical to the amino acid sequence of any one of SEQ ID NOS: 1-112.

[0189] In some embodiments, the catalytic domain is derived from a deubiquitinase that consists of an amino acid sequence at least 80%, 81%, 82%, 83%, 84%, 85%, 86%, 87%, 88%, 89%, 90%, 91%, 92%, 93%, 94%, 95%, 96%, 97%, 98%, 99%, or 100% identical to the amino acid sequence of SEQ ID NO: 1. In some embodiments, the catalytic domain is derived from a deubiquitinase that consists of an amino acid sequence at least 80%, 81%, 82%, 83%, 84%, 85%, 86%, 87%, 88%, 89%, 90%, 91%, 92%, 93%, 94%, 95%, 96%, 97%, 98%, 99%, or 100% identical to the amino acid sequence of SEQ ID NO: 2. In some embodiments, the catalytic domain is derived from a deubiquitinase that consists of an amino acid sequence at least 80%, 81%, 82%, 83%, 84%, 85%, 86%, 87%, 88%, 89%, 90%, 91%, 92%, 93%, 94%, 95%, 96%, 97%, 98%, 99%, or 100% identical to the amino acid sequence of SEQ ID NO: 3. In some embodiments, the catalytic domain is derived from a deubiquitinase that consists of an amino acid sequence at least 80%, 81%, 82%, 83%, 84%, 85%, 86%, 87%, 88%, 89%, 90%, 91%, 92%, 93%, 94%, 95%, 96%, 97%, 98%, 99%, or 100% identical to the amino acid sequence of SEQ ID NO: 4. In some embodiments, the catalytic domain is derived from a deubiquitinase that consists of an amino acid sequence at least 80%, 81%, 82%, 83%, 84%, 85%, 86%, 87%, 88%, 89%, 90%, 91%, 92%, 93%, 94%, 95%, 96%, 97%, 98%, 99%, or 100% identical to the amino acid sequence of SEQ ID NO: 5. In some embodiments, the catalytic domain is derived from a deubiquitinase that consists of an amino acid sequence at least 80%, 81%, 82%, 83%, 84%, 85%, 86%, 87%, 88%, 89%, 90%, 91%, 92%, 93%, 94%, 95%, 96%, 97%, 98%, 99%, or 100% identical to the amino acid sequence of SEQ ID NO: 6. In some embodiments, the catalytic domain is derived from a deubiquitinase that consists of an amino acid sequence at least 80%, 81%, 82%, 83%, 84%, 85%, 86%, 87%, 88%, 89%, 90%, 91%, 92%, 93%, 94%, 95%, 96%, 97%, 98%, 99%, or 100% identical to the amino acid sequence of SEQ ID NO: 7. In some embodiments, the catalytic domain is derived from a deubiquitinase that consists of an amino acid sequence at least 80%, 81%, 82%, 83%, 84%, 85%, 86%, 87%, 88%, 89%, 90%, 91%, 92%, 93%, 94%, 95%, 96%, 97%, 98%, 99%, or 100% identical to the amino acid sequence of SEQ ID NO: 8. In some embodiments, the catalytic domain is derived from a deubiquitinase that consists of an amino acid sequence at least 80%, 81%, 82%, 83%, 84%, 85%, 86%, 87%, 88%, 89%, 90%, 91%, 92%, 93%, 94%, 95%, 96%, 97%, 98%, 99%, or 100% identical to the amino acid sequence of SEQ ID NO: 9. In some embodiments, the catalytic domain is derived from a deubiquitinase that consists of an amino acid sequence at least 80%, 81%, 82%, 83%, 84%, 85%, 86%, 87%, 88%, 89%, 90%, 91%, 92%, 93%, 94%, 95%, 96%, 97%, 98%, 99%, or 100% identical to the amino acid sequence of SEQ ID NO: 10. In some embodiments, the catalytic domain is derived from a deubiquitinase that consists of an amino acid sequence at least 80%, 81%, 82%, 83%, 84%, 85%, 86%, 87%, 88%, 89%, 90%, 91%, 92%, 93%, 94%, 95%, 96%, 97%, 98%, 99%, or 100% identical to the amino acid sequence of SEQ ID NO: 11. In some embodiments, the catalytic domain is derived from a deubiquitinase that consists of an amino acid sequence at least 80%, 81%, 82%, 83%, 84%, 85%, 86%, 87%, 88%, 89%, 90%, 91%, 92%, 93%, 94%, 95%, 96%, 97%, 98%, 99%, or 100% identical to the amino acid sequence of SEQ ID NO: 12. In some embodiments, the catalytic domain is derived from a deubiquitinase that consists of an amino acid sequence at least 80%, 81%, 82%, 83%, 84%, 85%, 86%, 87%, 88%, 89%, 90%, 91%, 92%, 93%, 94%, 95%, 96%, 97%, 98%, 99%, or 100% identical to the amino acid sequence of SEQ ID NO: 13. In some embodiments, the catalytic domain is derived from a deubiquitinase that consists of an amino acid sequence at least 80%, 81%, 82%, 83%, 84%, 85%, 86%, 87%, 88%, 89%, 90%, 91%, 92%, 93%, 94%, 95%, 96%, 97%, 98%, 99%, or 100% identical to the amino acid sequence of SEQ ID NO: 14. In some embodiments, the catalytic domain is derived from a deubiquitinase that consists of an amino acid sequence at least 80%, 81%, 82%, 83%, 84%, 85%, 86%, 87%, 88%, 89%, 90%, 91%, 92%, 93%, 94%, 95%, 96%, 97%, 98%, 99%, or 100% identical to the amino acid sequence of SEQ ID NO: 15. In some embodiments, the catalytic domain is derived from a deubiquitinase that consists of an amino acid sequence at least 80%, 81%, 82%, 83%, 84%, 85%, 86%, 87%, 88%, 89%, 90%, 91%, 92%, 93%, 94%, 95%, 96%, 97%, 98%, 99%, or 100% identical to the amino acid sequence of SEQ ID NO: 16. In some embodiments, the catalytic domain is derived from a deubiquitinase that consists of an amino acid sequence at least 80%, 81%, 82%, 83%, 84%, 85%, 86%, 87%, 88%, 89%, 90%, 91%, 92%, 93%, 94%, 95%, 96%, 97%, 98%, 99%, or 100% identical to the amino acid sequence of SEQ ID NO: 17. In some embodiments, the catalytic domain is derived from a deubiquitinase that consists of an amino acid sequence at least 80%, 81%, 82%, 83%, 84%, 85%, 86%, 87%, 88%, 89%, 90%, 91%, 92%, 93%, 94%, 95%, 96%, 97%, 98%, 99%, or 100% identical to the amino acid sequence of SEQ ID NO: 18. In some embodiments, the catalytic domain is derived from a deubiquitinase that consists of an amino acid sequence at least 80%, 81%, 82%, 83%, 84%, 85%, 86%, 87%, 88%, 89%, 90%, 91%, 92%, 93%, 94%, 95%, 96%, 97%, 98%, 99%, or 100% identical to the amino acid sequence of SEQ ID NO: 19. In some embodiments, the catalytic domain is derived from a deubiquitinase that consists of an amino acid sequence at least 80%, 81%, 82%, 83%, 84%, 85%, 86%, 87%, 88%, 89%, 90%, 91%, 92%, 93%, 94%, 95%, 96%, 97%, 98%, 99%, or 100% identical to the amino acid sequence of SEQ ID NO: 20. In some embodiments, the catalytic domain is derived from a deubiquitinase that consists of an amino acid sequence at least 80%, 81%, 82%, 83%, 84%, 85%, 86%, 87%, 88%, 89%, 90%, 91%, 92%, 93%, 94%, 95%, 96%, 97%, 98%, 99%, or 100% identical to the amino acid sequence of SEQ ID NO: 21. In some embodiments, the catalytic domain is derived from a deubiquitinase that consists of an amino acid sequence at least 80%, 81%, 82%, 83%, 84%, 85%, 86%, 87%, 88%, 89%, 90%, 91%, 92%, 93%, 94%, 95%, 96%, 97%, 98%, 99%, or 100% identical to the amino acid sequence of SEQ ID NO: 22. In some embodiments, the catalytic domain is derived from a deubiquitinase that consists of an amino acid sequence at least 80%, 81%, 82%, 83%, 84%, 85%, 86%, 87%, 88%, 89%, 90%, 91%, 92%, 93%, 94%, 95%, 96%, 97%, 98%, 99%, or 100% identical to the amino acid sequence of SEQ ID NO: 23. In some embodiments, the catalytic domain is derived from a deubiquitinase that consists of an amino acid sequence at least 80%, 81%, 82%, 83%, 84%, 85%, 86%, 87%, 88%, 89%, 90%, 91%, 92%, 93%, 94%, 95%, 96%, 97%, 98%, 99%, or 100% identical to the amino acid sequence of SEQ ID NO: 24. In some embodiments, the catalytic domain is derived from a deubiquitinase that consists of an amino acid sequence at least 80%, 81%, 82%, 83%, 84%, 85%, 86%, 87%, 88%, 89%, 90%, 91%, 92%, 93%, 94%, 95%, 96%, 97%, 98%, 99%, or 100% identical to the amino acid sequence of SEQ ID NO: 25. In some embodiments, the catalytic domain is derived from a deubiquitinase that consists of an amino acid sequence at least 80%, 81%, 82%, 83%, 84%, 85%, 86%, 87%, 88%, 89%, 90%, 91%, 92%, 93%, 94%, 95%, 96%, 97%, 98%, 99%, or 100% identical to the amino acid sequence of SEQ ID NO: 26. In some embodiments, the catalytic domain is derived from a deubiquitinase that consists of an amino acid sequence at least 80%, 81%, 82%, 83%, 84%, 85%, 86%, 87%, 88%, 89%, 90%, 91%, 92%, 93%, 94%, 95%, 96%, 97%, 98%, 99%, or 100% identical to the amino acid sequence of SEQ ID NO: 27. In some embodiments, the catalytic domain is derived from a deubiquitinase that consists of an amino acid sequence at least 80%, 81%, 82%, 83%, 84%, 85%, 86%, 87%, 88%, 89%, 90%, 91%, 92%, 93%, 94%, 95%, 96%, 97%, 98%, 99%, or 100% identical to the amino acid sequence of SEQ ID NO: 28. In some embodiments, the catalytic domain is derived from a deubiquitinase that consists of an amino acid sequence at least 80%, 81%, 82%, 83%, 84%, 85%, 86%, 87%, 88%, 89%, 90%, 91%, 92%, 93%, 94%, 95%, 96%, 97%, 98%, 99%, or 100% identical to the amino acid sequence of SEQ ID NO: 29. In some embodiments, the catalytic domain is derived from a deubiquitinase that consists of an amino acid sequence at least 80%, 81%, 82%, 83%, 84%, 85%, 86%, 87%, 88%, 89%, 90%, 91%, 92%, 93%, 94%, 95%, 96%, 97%, 98%, 99%, or 100% identical to the amino acid sequence of SEQ ID NO: 30. In some embodiments, the catalytic domain is derived from a deubiquitinase that consists of an amino acid sequence at least 80%, 81%, 82%, 83%, 84%, 85%, 86%, 87%, 88%, 89%, 90%, 91%, 92%, 93%, 94%, 95%, 96%, 97%, 98%, 99%, or 100% identical to the amino acid sequence of SEQ ID NO: 31. In some embodiments, the catalytic domain is derived from a deubiquitinase that consists of an amino acid sequence at least 80%, 81%, 82%, 83%, 84%, 85%, 86%, 87%, 88%, 89%, 90%, 91%, 92%, 93%, 94%, 95%, 96%, 97%, 98%, 99%, or 100% identical to the amino acid sequence of SEQ ID NO: 32. In some embodiments, the catalytic domain is derived from a deubiquitinase that consists of an amino acid sequence at least 80%, 81%, 82%, 83%, 84%, 85%, 86%, 87%, 88%, 89%, 90%, 91%, 92%, 93%, 94%, 95%, 96%, 97%, 98%, 99%, or 100% identical to the amino acid sequence of SEQ ID NO: 33. In some embodiments, the catalytic domain is derived from a deubiquitinase that consists of an amino acid sequence at least 80%, 81%, 82%, 83%, 84%, 85%, 86%, 87%, 88%, 89%, 90%, 91%, 92%, 93%, 94%, 95%, 96%, 97%, 98%, 99%, or 100% identical to the amino acid sequence of SEQ ID NO: 34. In some embodiments, the catalytic domain is derived from a deubiquitinase that consists of an amino acid sequence at least 80%, 81%, 82%, 83%, 84%, 85%, 86%, 87%, 88%, 89%, 90%, 91%, 92%, 93%, 94%, 95%, 96%, 97%, 98%, 99%, or 100% identical to the amino acid sequence of SEQ ID NO: 35. In some embodiments, the catalytic domain is derived from a deubiquitinase that consists of an amino acid sequence at least 80%, 81%, 82%, 83%, 84%, 85%, 86%, 87%, 88%, 89%, 90%, 91%, 92%, 93%, 94%, 95%, 96%, 97%, 98%, 99%, or 100% identical to the amino acid sequence of SEQ ID NO: 36. In some embodiments, the catalytic domain is derived from a deubiquitinase that consists of an amino acid sequence at least 80%, 81%, 82%, 83%, 84%, 85%, 86%, 87%, 88%, 89%, 90%, 91%, 92%, 93%, 94%, 95%, 96%, 97%, 98%, 99%, or 100% identical to the amino acid sequence of SEQ ID NO: 37. In some embodiments, the catalytic domain is derived from a deubiquitinase that consists of an amino acid sequence at least 80%, 81%, 82%, 83%, 84%, 85%, 86%, 87%, 88%, 89%, 90%, 91%, 92%, 93%, 94%, 95%, 96%, 97%, 98%, 99%, or 100% identical to the amino acid sequence of SEQ ID NO: 38. In some embodiments, the catalytic domain is derived from a deubiquitinase that consists of an amino acid sequence at least 80%, 81%, 82%, 83%, 84%, 85%, 86%, 87%, 88%, 89%, 90%, 91%, 92%, 93%, 94%, 95%, 96%, 97%, 98%, 99%, or 100% identical to the amino acid sequence of SEQ ID NO: 39. In some embodiments, the catalytic domain is derived from a deubiquitinase that consists of an amino acid sequence at least 80%, 81%, 82%, 83%, 84%, 85%, 86%, 87%, 88%, 89%, 90%, 91%, 92%, 93%, 94%, 95%, 96%, 97%, 98%, 99%, or 100% identical to the amino acid sequence of SEQ ID NO: 40. In some embodiments, the catalytic domain is derived from a deubiquitinase that consists of an amino acid sequence at least 80%, 81%, 82%, 83%, 84%, 85%, 86%, 87%, 88%, 89%, 90%, 91%, 92%, 93%, 94%, 95%, 96%, 97%, 98%, 99%, or 100% identical to the amino acid sequence of SEQ ID NO: 41. In some embodiments, the catalytic domain is derived from a deubiquitinase that consists of an amino acid sequence at least 80%, 81%, 82%, 83%, 84%, 85%, 86%, 87%, 88%, 89%, 90%, 91%, 92%, 93%, 94%, 95%, 96%, 97%, 98%, 99%, or 100% identical to the amino acid sequence of SEQ ID NO: 42. In some embodiments, the catalytic domain is derived from a deubiquitinase that consists of an amino acid sequence at least 80%, 81%, 82%, 83%, 84%, 85%, 86%, 87%, 88%, 89%, 90%, 91%, 92%, 93%, 94%, 95%, 96%, 97%, 98%, 99%, or 100% identical to the amino acid sequence of SEQ ID NO: 43. In some embodiments, the catalytic domain is derived from a deubiquitinase that consists of an amino acid sequence at least 80%, 81%, 82%, 83%, 84%, 85%, 86%, 87%, 88%, 89%, 90%, 91%, 92%, 93%, 94%, 95%, 96%, 97%, 98%, 99%, or 100% identical to the amino acid sequence of SEQ ID NO: 44. In some embodiments, the catalytic domain is derived from a deubiquitinase that consists of an amino acid sequence at least 80%, 81%, 82%, 83%, 84%, 85%, 86%, 87%, 88%, 89%, 90%, 91%, 92%, 93%, 94%, 95%, 96%, 97%, 98%, 99%, or 100% identical to the amino acid sequence of SEQ ID NO: 45. In some embodiments, the catalytic domain is derived from a deubiquitinase that consists of an amino acid sequence at least 80%, 81%, 82%, 83%, 84%, 85%, 86%, 87%, 88%, 89%, 90%, 91%, 92%, 93%, 94%, 95%, 96%, 97%, 98%, 99%, or 100% identical to the amino acid sequence of SEQ ID NO: 46. In some embodiments, the catalytic domain is derived from a deubiquitinase that consists of an amino acid sequence at least 80%, 81%, 82%, 83%, 84%, 85%, 86%, 87%, 88%, 89%, 90%, 91%, 92%, 93%, 94%, 95%, 96%, 97%, 98%, 99%, or 100% identical to the amino acid sequence of SEQ ID NO: 47. In some embodiments, the catalytic domain is derived from a deubiquitinase that consists of an amino acid sequence at least 80%, 81%, 82%, 83%, 84%, 85%, 86%, 87%, 88%, 89%, 90%, 91%, 92%, 93%, 94%, 95%, 96%, 97%, 98%, 99%, or 100% identical to the amino acid sequence of SEQ ID NO: 48. In some embodiments, the catalytic domain is derived from a deubiquitinase that consists of an amino acid sequence at least 80%, 81%, 82%, 83%, 84%, 85%, 86%, 87%, 88%, 89%, 90%, 91%, 92%, 93%, 94%, 95%, 96%, 97%, 98%, 99%, or 100% identical to the amino acid sequence of SEQ ID NO: 49. In some embodiments, the catalytic domain is derived from a deubiquitinase that consists of an amino acid sequence at least 80%, 81%, 82%, 83%, 84%, 85%, 86%, 87%, 88%, 89%, 90%, 91%, 92%, 93%, 94%, 95%, 96%, 97%, 98%, 99%, or 100% identical to the amino acid sequence of SEQ ID NO: 50. In some embodiments, the catalytic domain is derived from a deubiquitinase that consists of an amino acid sequence at least 80%, 81%, 82%, 83%, 84%, 85%, 86%, 87%, 88%, 89%, 90%, 91%, 92%, 93%, 94%, 95%, 96%, 97%, 98%, 99%, or 100% identical to the amino acid sequence of SEQ ID NO: 51. In some embodiments, the catalytic domain is derived from a deubiquitinase that consists of an amino acid sequence at least 80%, 81%, 82%, 83%, 84%, 85%, 86%, 87%, 88%, 89%, 90%, 91%, 92%, 93%, 94%, 95%, 96%, 97%, 98%, 99%, or 100% identical to the amino acid sequence of SEQ ID NO: 52. In some embodiments, the catalytic domain is derived from a deubiquitinase that consists of an amino acid sequence at least 80%, 81%, 82%, 83%, 84%, 85%, 86%, 87%, 88%, 89%, 90%, 91%, 92%, 93%, 94%, 95%, 96%, 97%, 98%, 99%, or 100% identical to the amino acid sequence of SEQ ID NO: 53. In some embodiments, the catalytic domain is derived from a deubiquitinase that consists of an amino acid sequence at least 80%, 81%, 82%, 83%, 84%, 85%, 86%, 87%, 88%, 89%, 90%, 91%, 92%, 93%, 94%, 95%, 96%, 97%, 98%, 99%, or 100% identical to the amino acid sequence of SEQ ID NO: 54. In some embodiments, the catalytic domain is derived from a deubiquitinase that consists of an amino acid sequence at least 80%, 81%, 82%, 83%, 84%, 85%, 86%, 87%, 88%, 89%, 90%, 91%, 92%, 93%, 94%, 95%, 96%, 97%, 98%, 99%, or 100% identical to the amino acid sequence of SEQ ID NO: 55. In some embodiments, the catalytic domain is derived from a deubiquitinase that consists of an amino acid sequence at least 80%, 81%, 82%, 83%, 84%, 85%, 86%, 87%, 88%, 89%, 90%, 91%, 92%, 93%, 94%, 95%, 96%, 97%, 98%, 99%, or 100% identical to the amino acid sequence of SEQ ID NO: 56. In some embodiments, the catalytic domain is derived from a deubiquitinase that consists of an amino acid sequence at least 80%, 81%, 82%, 83%, 84%, 85%, 86%, 87%, 88%, 89%, 90%, 91%, 92%, 93%, 94%, 95%, 96%, 97%, 98%, 99%, or 100% identical to the amino acid sequence of SEQ ID NO: 57. In some embodiments, the catalytic domain is derived from a deubiquitinase that consists of an amino acid sequence at least 80%, 81%, 82%, 83%, 84%, 85%, 86%, 87%, 88%, 89%, 90%, 91%, 92%, 93%, 94%, 95%, 96%, 97%, 98%, 99%, or 100% identical to the amino acid sequence of SEQ ID NO: 58. In some embodiments, the catalytic domain is derived from a deubiquitinase that consists of an amino acid sequence at least 80%, 81%, 82%, 83%, 84%, 85%, 86%, 87%, 88%, 89%, 90%, 91%, 92%, 93%, 94%, 95%, 96%, 97%, 98%, 99%, or 100% identical to the amino acid sequence of SEQ ID NO: 59. In some embodiments, the catalytic domain is derived from a deubiquitinase that consists of an amino acid sequence at least 80%, 81%, 82%, 83%, 84%, 85%, 86%, 87%, 88%, 89%, 90%, 91%, 92%, 93%, 94%, 95%, 96%, 97%, 98%, 99%, or 100% identical to the amino acid sequence of SEQ ID NO: 60. In some embodiments, the catalytic domain is derived from a deubiquitinase that consists of an amino acid sequence at least 80%, 81%, 82%, 83%, 84%, 85%, 86%, 87%, 88%, 89%, 90%, 91%, 92%, 93%, 94%, 95%, 96%, 97%, 98%, 99%, or 100% identical to the amino acid sequence of SEQ ID NO: 61. In some embodiments, the catalytic domain is derived from a deubiquitinase that consists of an amino acid sequence at least 80%, 81%, 82%, 83%, 84%, 85%, 86%, 87%, 88%, 89%, 90%, 91%, 92%, 93%, 94%, 95%, 96%, 97%, 98%, 99%, or 100% identical to the amino acid sequence of SEQ ID NO: 62. In some embodiments, the catalytic domain is derived from a deubiquitinase that consists of an amino acid sequence at least 80%, 81%, 82%, 83%, 84%, 85%, 86%, 87%, 88%, 89%, 90%, 91%, 92%, 93%, 94%, 95%, 96%, 97%, 98%, 99%, or 100% identical to the amino acid sequence of SEQ ID NO: 63. In some embodiments, the catalytic domain is derived from a deubiquitinase that consists of an amino acid sequence at least 80%, 81%, 82%, 83%, 84%, 85%, 86%, 87%, 88%, 89%, 90%, 91%, 92%, 93%, 94%, 95%, 96%, 97%, 98%, 99%, or 100% identical to the amino acid sequence of SEQ ID NO: 64. In some embodiments, the catalytic domain is derived from a deubiquitinase that consists of an amino acid sequence at least 80%, 81%, 82%, 83%, 84%, 85%, 86%, 87%, 88%, 89%, 90%, 91%, 92%, 93%, 94%, 95%, 96%, 97%, 98%, 99%, or 100% identical to the amino acid sequence of SEQ ID NO: 65. In some embodiments, the catalytic domain is derived from a deubiquitinase that consists of an amino acid sequence at least 80%, 81%, 82%, 83%, 84%, 85%, 86%, 87%, 88%, 89%, 90%, 91%, 92%, 93%, 94%, 95%, 96%, 97%, 98%, 99%, or 100% identical to the amino acid sequence of SEQ ID NO: 66. In some embodiments, the catalytic domain is derived from a deubiquitinase that consists of an amino acid sequence at least 80%, 81%, 82%, 83%, 84%, 85%, 86%, 87%, 88%, 89%, 90%, 91%, 92%, 93%, 94%, 95%, 96%, 97%, 98%, 99%, or 100% identical to the amino acid sequence of SEQ ID NO: 67. In some embodiments, the catalytic domain is derived from a deubiquitinase that consists of an amino acid sequence at least 80%, 81%, 82%, 83%, 84%, 85%, 86%, 87%, 88%, 89%, 90%, 91%, 92%, 93%, 94%, 95%, 96%, 97%, 98%, 99%, or 100% identical to the amino acid sequence of SEQ ID NO: 68. In some embodiments, the catalytic domain is derived from a deubiquitinase that consists of an amino acid sequence at least 80%, 81%, 82%, 83%, 84%, 85%, 86%, 87%, 88%, 89%, 90%, 91%, 92%, 93%, 94%, 95%, 96%, 97%, 98%, 99%, or 100% identical to the amino acid sequence of SEQ ID NO: 69. In some embodiments, the catalytic domain is derived from a deubiquitinase that consists of an amino acid sequence at least 80%, 81%, 82%, 83%, 84%, 85%, 86%, 87%, 88%, 89%, 90%, 91%, 92%, 93%, 94%, 95%, 96%, 97%, 98%, 99%, or 100% identical to the amino acid sequence of SEQ ID NO: 70. In some embodiments, the catalytic domain is derived from a deubiquitinase that consists of an amino acid sequence at least 80%, 81%, 82%, 83%, 84%, 85%, 86%, 87%, 88%, 89%, 90%, 91%, 92%, 93%, 94%, 95%, 96%, 97%, 98%, 99%, or 100% identical to the amino acid sequence of SEQ ID NO: 71. In some embodiments, the catalytic domain is derived from a deubiquitinase that consists of an amino acid sequence at least 80%, 81%, 82%, 83%, 84%, 85%, 86%, 87%, 88%, 89%, 90%, 91%, 92%, 93%, 94%, 95%, 96%, 97%, 98%, 99%, or 100% identical to the amino acid sequence of SEQ ID NO: 72. In some embodiments, the catalytic domain is derived from a deubiquitinase that consists of an amino acid sequence at least 80%, 81%, 82%, 83%, 84%, 85%, 86%, 87%, 88%, 89%, 90%, 91%, 92%, 93%, 94%, 95%, 96%, 97%, 98%, 99%, or 100% identical to the amino acid sequence of SEQ ID NO: 73. In some embodiments, the catalytic domain is derived from a deubiquitinase that consists of an amino acid sequence at least 80%, 81%, 82%, 83%, 84%, 85%, 86%, 87%, 88%, 89%, 90%, 91%, 92%, 93%, 94%, 95%, 96%, 97%, 98%, 99%, or 100% identical to the amino acid sequence of SEQ ID NO: 74. In some embodiments, the catalytic domain is derived from a deubiquitinase that consists of an amino acid sequence at least 80%, 81%, 82%, 83%, 84%, 85%, 86%, 87%, 88%, 89%, 90%, 91%, 92%, 93%, 94%, 95%, 96%, 97%, 98%, 99%, or 100% identical to the amino acid sequence of SEQ ID NO: 75. In some embodiments, the catalytic domain is derived from a deubiquitinase that consists of an amino acid sequence at least 80%, 81%, 82%, 83%, 84%, 85%, 86%, 87%, 88%, 89%, 90%, 91%, 92%, 93%, 94%, 95%, 96%, 97%, 98%, 99%, or 100% identical to the amino acid sequence of SEQ ID NO: 76. In some embodiments, the catalytic domain is derived from a deubiquitinase that consists of an amino acid sequence at least 80%, 81%, 82%, 83%, 84%, 85%, 86%, 87%, 88%, 89%, 90%, 91%, 92%, 93%, 94%, 95%, 96%, 97%, 98%, 99%, or 100% identical to the amino acid sequence of SEQ ID NO: 77. In some embodiments, the catalytic domain is derived from a deubiquitinase that consists of an amino acid sequence at least 80%, 81%, 82%, 83%, 84%, 85%, 86%, 87%, 88%, 89%, 90%, 91%, 92%, 93%, 94%, 95%, 96%, 97%, 98%, 99%, or 100% identical to the amino acid sequence of SEQ ID NO: 78. In some embodiments, the catalytic domain is derived from a deubiquitinase that consists of an amino acid sequence at least 80%, 81%, 82%, 83%, 84%, 85%, 86%, 87%, 88%, 89%, 90%, 91%, 92%, 93%, 94%, 95%, 96%, 97%, 98%, 99%, or 100% identical to the amino acid sequence of SEQ ID NO: 79. In some embodiments, the catalytic domain is derived from a deubiquitinase that consists of an amino acid sequence at least 80%, 81%, 82%, 83%, 84%, 85%, 86%, 87%, 88%, 89%, 90%, 91%, 92%, 93%, 94%, 95%, 96%, 97%, 98%, 99%, or 100% identical to the amino acid sequence of SEQ ID NO: 80. In some embodiments, the catalytic domain is derived from a deubiquitinase that consists of an amino acid sequence at least 80%, 81%, 82%, 83%, 84%, 85%, 86%, 87%, 88%, 89%, 90%, 91%, 92%, 93%, 94%, 95%, 96%, 97%, 98%, 99%, or 100% identical to the amino acid sequence of SEQ ID NO: 81. In some embodiments, the catalytic domain is derived from a deubiquitinase that consists of an amino acid sequence at least 80%, 81%, 82%, 83%, 84%, 85%, 86%, 87%, 88%, 89%, 90%, 91%, 92%, 93%, 94%, 95%, 96%, 97%, 98%, 99%, or 100% identical to the amino acid sequence of SEQ ID NO: 82. In some embodiments, the catalytic domain is derived from a deubiquitinase that consists of an amino acid sequence at least 80%, 81%, 82%, 83%, 84%, 85%, 86%, 87%, 88%, 89%, 90%, 91%, 92%, 93%, 94%, 95%, 96%, 97%, 98%, 99%, or 100% identical to the amino acid sequence of SEQ ID NO: 83. In some embodiments, the catalytic domain is derived from a deubiquitinase that consists of an amino acid sequence at least 80%, 81%, 82%, 83%, 84%, 85%, 86%, 87%, 88%, 89%, 90%, 91%, 92%, 93%, 94%, 95%, 96%, 97%, 98%, 99%, or 100% identical to the amino acid sequence of SEQ ID NO: 84. In some embodiments, the catalytic domain is derived from a deubiquitinase that consists of an amino acid sequence at least 80%, 81%, 82%, 83%, 84%, 85%, 86%, 87%, 88%, 89%, 90%, 91%, 92%, 93%, 94%, 95%, 96%, 97%, 98%, 99%, or 100% identical to the amino acid sequence of SEQ ID NO: 85. In some embodiments, the catalytic domain is derived from a deubiquitinase that consists of an amino acid sequence at least 80%, 81%, 82%, 83%, 84%, 85%, 86%, 87%, 88%, 89%, 90%, 91%, 92%, 93%, 94%, 95%, 96%, 97%, 98%, 99%, or 100% identical to the amino acid sequence of SEQ ID NO: 86. In some embodiments, the catalytic domain is derived from a deubiquitinase that consists of an amino acid sequence at least 80%, 81%, 82%, 83%, 84%, 85%, 86%, 87%, 88%, 89%, 90%, 91%, 92%, 93%, 94%, 95%, 96%, 97%, 98%, 99%, or 100% identical to the amino acid sequence of SEQ ID NO: 87. In some embodiments, the catalytic domain is derived from a deubiquitinase that consists of an amino acid sequence at least 80%, 81%, 82%, 83%, 84%, 85%, 86%, 87%, 88%, 89%, 90%, 91%, 92%, 93%, 94%, 95%, 96%, 97%, 98%, 99%, or 100% identical to the amino acid sequence of SEQ ID NO: 88. In some embodiments, the catalytic domain is derived from a deubiquitinase that consists of an amino acid sequence at least 80%, 81%, 82%, 83%, 84%, 85%, 86%, 87%, 88%, 89%, 90%, 91%, 92%, 93%, 94%, 95%, 96%, 97%, 98%, 99%, or 100% identical to the amino acid sequence of SEQ ID NO: 89. In some embodiments, the catalytic domain is derived from a deubiquitinase that consists of an amino acid sequence at least 80%, 81%, 82%, 83%, 84%, 85%, 86%, 87%, 88%, 89%, 90%, 91%, 92%, 93%, 94%, 95%, 96%, 97%, 98%, 99%, or 100% identical to the amino acid sequence of SEQ ID NO: 90. In some embodiments, the catalytic domain is derived from a deubiquitinase that consists of an amino acid sequence at least 80%, 81%, 82%, 83%, 84%, 85%, 86%, 87%, 88%, 89%, 90%, 91%, 92%, 93%, 94%, 95%, 96%, 97%, 98%, 99%, or 100% identical to the amino acid sequence of SEQ ID NO: 91. In some embodiments, the catalytic domain is derived from a deubiquitinase that consists of an amino acid sequence at least 80%, 81%, 82%, 83%, 84%, 85%, 86%, 87%, 88%, 89%, 90%, 91%, 92%, 93%, 94%, 95%, 96%, 97%, 98%, 99%, or 100% identical to the amino acid sequence of SEQ ID NO: 92. In some embodiments, the catalytic domain is derived from a deubiquitinase that consists of an amino acid sequence at least 80%, 81%, 82%, 83%, 84%, 85%, 86%, 87%, 88%, 89%, 90%, 91%, 92%, 93%, 94%, 95%, 96%, 97%, 98%, 99%, or 100% identical to the amino acid sequence of SEQ ID NO: 93. In some embodiments, the catalytic domain is derived from a deubiquitinase that consists of an amino acid sequence at least 80%, 81%, 82%, 83%, 84%, 85%, 86%, 87%, 88%, 89%, 90%, 91%, 92%, 93%, 94%, 95%, 96%, 97%, 98%, 99%, or 100% identical to the amino acid sequence of SEQ ID NO: 94. In some embodiments, the catalytic domain is derived from a deubiquitinase that consists of an amino acid sequence at least 80%, 81%, 82%, 83%, 84%, 85%, 86%, 87%, 88%, 89%, 90%, 91%, 92%, 93%, 94%, 95%, 96%, 97%, 98%, 99%, or 100% identical to the amino acid sequence of SEQ ID NO: 95. In some embodiments, the catalytic domain is derived from a deubiquitinase that consists of an amino acid sequence at least 80%, 81%, 82%, 83%, 84%, 85%, 86%, 87%, 88%, 89%, 90%, 91%, 92%, 93%, 94%, 95%, 96%, 97%, 98%, 99%, or 100% identical to the amino acid sequence of SEQ ID NO: 96. In some embodiments, the catalytic domain is derived from a deubiquitinase that consists of an amino acid sequence at least 80%, 81%, 82%, 83%, 84%, 85%, 86%, 87%, 88%, 89%, 90%, 91%, 92%, 93%, 94%, 95%, 96%, 97%, 98%, 99%, or 100% identical to the amino acid sequence of SEQ ID NO: 97. In some embodiments, the catalytic domain is derived from a deubiquitinase that consists of an amino acid sequence at least 80%, 81%, 82%, 83%, 84%, 85%, 86%, 87%, 88%, 89%, 90%, 91%, 92%, 93%, 94%, 95%, 96%, 97%, 98%, 99%, or 100% identical to the amino acid sequence of SEQ ID NO: 98. In some embodiments, the catalytic domain is derived from a deubiquitinase that consists of an amino acid sequence at least 80%, 81%, 82%, 83%, 84%, 85%, 86%, 87%, 88%, 89%, 90%, 91%, 92%, 93%, 94%, 95%, 96%, 97%, 98%, 99%, or 100% identical to the amino acid sequence of SEQ ID NO: 99. In some embodiments, the catalytic domain is derived from a deubiquitinase that consists of an amino acid sequence at least 80%, 81%, 82%, 83%, 84%, 85%, 86%, 87%, 88%, 89%, 90%, 91%, 92%, 93%, 94%, 95%, 96%, 97%, 98%, 99%, or 100% identical to the amino acid sequence of SEQ ID NO: 100. In some embodiments, the catalytic domain is derived from a deubiquitinase that consists of an amino acid sequence at least 80%, 81%, 82%, 83%, 84%, 85%, 86%, 87%, 88%, 89%, 90%, 91%, 92%, 93%, 94%, 95%, 96%, 97%, 98%, 99%, or 100% identical to the amino acid sequence of SEQ ID NO: 101. In some embodiments, the catalytic domain is derived from a deubiquitinase that consists of an amino acid sequence at least 80%, 81%, 82%, 83%, 84%, 85%, 86%, 87%, 88%, 89%, 90%, 91%, 92%, 93%, 94%, 95%, 96%, 97%, 98%, 99%, or 100% identical to the amino acid sequence of SEQ ID NO: 102. In some embodiments, the catalytic domain is derived from a deubiquitinase that consists of an amino acid sequence at least 80%, 81%, 82%, 83%, 84%, 85%, 86%, 87%, 88%, 89%, 90%, 91%, 92%, 93%, 94%, 95%, 96%, 97%, 98%, 99%, or 100% identical to the amino acid sequence of SEQ ID NO: 102. In some embodiments, the catalytic domain is derived from a deubiquitinase that consists of an amino acid sequence at least 80%, 81%, 82%, 83%, 84%, 85%, 86%, 87%, 88%, 89%, 90%, 91%, 92%, 93%, 94%, 95%, 96%, 97%, 98%, 99%, or 100% identical to the amino acid sequence of SEQ ID NO: 104. In some embodiments, the catalytic domain is derived from a deubiquitinase that consists of an amino acid sequence at least 80%, 81%, 82%, 83%, 84%, 85%, 86%, 87%, 88%, 89%, 90%, 91%, 92%, 93%, 94%, 95%, 96%, 97%, 98%, 99%, or 100% identical to the amino acid sequence of SEQ ID NO: 105. In some embodiments, the catalytic domain is derived from a deubiquitinase that consists of an amino acid sequence at least 80%, 81%, 82%, 83%, 84%, 85%, 86%, 87%, 88%, 89%, 90%, 91%, 92%, 93%, 94%, 95%, 96%, 97%, 98%, 99%, or 100% identical to the amino acid sequence of SEQ ID NO: 106. In some embodiments, the catalytic domain is derived from a deubiquitinase that consists of an amino acid sequence at least 80%, 81%, 82%, 83%, 84%, 85%, 86%, 87%, 88%, 89%, 90%, 91%, 92%, 93%, 94%, 95%, 96%, 97%, 98%, 99%, or 100% identical to the amino acid sequence of SEQ ID NO: 107. In some embodiments, the catalytic domain is derived from a deubiquitinase that consists of an amino acid sequence at least 80%, 81%, 82%, 83%, 84%, 85%, 86%, 87%, 88%, 89%, 90%, 91%, 92%, 93%, 94%, 95%, 96%, 97%, 98%, 99%, or 100% identical to the amino acid sequence of SEQ ID NO: 108. In some embodiments, the catalytic domain is derived from a deubiquitinase that consists of an amino acid sequence at least 80%, 81%, 82%, 83%, 84%, 85%, 86%, 87%, 88%, 89%, 90%, 91%, 92%, 93%, 94%, 95%, 96%, 97%, 98%, 99%, or 100% identical to the amino acid sequence of SEQ ID NO: 109. In some embodiments, the catalytic domain is derived from a deubiquitinase that consists of an amino acid sequence at least 80%, 81%, 82%, 83%, 84%, 85%, 86%, 87%, 88%, 89%, 90%, 91%, 92%, 93%, 94%, 95%, 96%, 97%, 98%, 99%, or 100% identical to the amino acid sequence of SEQ ID NO: 110. In some embodiments, the catalytic domain is derived from a deubiquitinase that consists of an amino acid sequence at least 80%, 81%, 82%, 83%, 84%, 85%, 86%, 87%, 88%, 89%, 90%, 91%, 92%, 93%, 94%, 95%, 96%, 97%, 98%, 99%, or 100% identical to the amino acid sequence of SEQ ID NO: 111. In some embodiments, the catalytic domain is derived from a deubiquitinase that consists of an amino acid sequence at least 80%, 81%, 82%, 83%, 84%, 85%, 86%, 87%, 88%, 89%, 90%, 91%, 92%, 93%, 94%, 95%, 96%, 97%, 98%, 99%, or 100% identical to the amino acid sequence of SEQ ID NO: 112.

[0190] In some embodiments, the catalytic domain comprises an amino acid sequence at least 80%, 81%, 82%, 83%, 84%, 85%, 86%, 87%, 88%, 89%, 90%, 91%, 92%, 93%, 94%, 95%, 96%, 97%, 98%, 99%, or 100% identical to the amino acid sequence of any one of SEQ ID NOS: 113-220 or 286. In some embodiments, the catalytic domain consists of an amino acid sequence at least 80%, 81%, 82%, 83%, 84%, 85%, 86%, 87%, 88%, 89%, 90%, 91%, 92%, 93%, 94%, 95%, 96%, 97%, 98%, 99%, or 100% identical to the amino acid sequence of any one of SEQ ID NOS: 113-220.

[0191] In some embodiments, the catalytic domain comprises an amino acid sequence at least 80%, 81%, 82%, 83%, 84%, 85%, 86%, 87%, 88%, 89%, 90%, 91%, 92%, 93%, 94%, 95%, 96%, 97%, 98%, 99%, or 100% identical to the amino acid sequence of SEQ ID NO: 113. In some embodiments, the catalytic domain comprises an amino acid sequence at least 80%, 81%, 82%, 83%, 84%, 85%, 86%, 87%, 88%, 89%, 90%, 91%, 92%, 93%, 94%, 95%, 96%, 97%, 98%, 99%, or 100% identical to the amino acid sequence of SEQ ID NO: 114. In some embodiments, the catalytic domain comprises an amino acid sequence at least 80%, 81%, 82%, 83%, 84%, 85%, 86%, 87%, 88%, 89%, 90%, 91%, 92%, 93%, 94%, 95%, 96%, 97%, 98%, 99%, or 100% identical to the amino acid sequence of SEQ ID NO: 115. In some embodiments, the catalytic domain comprises an amino acid sequence at least 80%, 81%, 82%, 83%, 84%, 85%, 86%, 87%, 88%, 89%, 90%, 91%, 92%, 93%, 94%, 95%, 96%, 97%, 98%, 99%, or 100% identical to the amino acid sequence of SEQ ID NO: 116. In some embodiments, the catalytic domain comprises an amino acid sequence at least 80%, 81%, 82%, 83%, 84%, 85%, 86%, 87%, 88%, 89%, 90%, 91%, 92%, 93%, 94%, 95%, 96%, 97%, 98%, 99%, or 100% identical to the amino acid sequence of SEQ ID NO: 117. In some embodiments, the catalytic domain comprises an amino acid sequence at least 80%, 81%, 82%, 83%, 84%, 85%, 86%, 87%, 88%, 89%, 90%, 91%, 92%, 93%, 94%, 95%, 96%, 97%, 98%, 99%, or 100% identical to the amino acid sequence of SEQ ID NO: 118. In some embodiments, the catalytic domain comprises an amino acid sequence at least 80%, 81%, 82%, 83%, 84%, 85%, 86%, 87%, 88%, 89%, 90%, 91%, 92%, 93%, 94%, 95%, 96%, 97%, 98%, 99%, or 100% identical to the amino acid sequence of SEQ ID NO: 119. In some embodiments, the catalytic domain comprises an amino acid sequence at least 80%, 81%, 82%, 83%, 84%, 85%, 86%, 87%, 88%, 89%, 90%, 91%, 92%, 93%, 94%, 95%, 96%, 97%, 98%, 99%, or 100% identical to the amino acid sequence of SEQ ID NO: 120. In some embodiments, the catalytic domain comprises an amino acid sequence at least 80%, 81%, 82%, 83%, 84%, 85%, 86%, 87%, 88%, 89%, 90%, 91%, 92%, 93%, 94%, 95%, 96%, 97%, 98%, 99%, or 100% identical to the amino acid sequence of SEQ ID NO: 121. In some embodiments, the catalytic domain comprises an amino acid sequence at least 80%, 81%, 82%, 83%, 84%, 85%, 86%, 87%, 88%, 89%, 90%, 91%, 92%, 93%, 94%, 95%, 96%, 97%, 98%, 99%, or 100% identical to the amino acid sequence of SEQ ID NO: 122. In some embodiments, the catalytic domain comprises an amino acid sequence at least 80%, 81%, 82%, 83%, 84%, 85%, 86%, 87%, 88%, 89%, 90%, 91%, 92%, 93%, 94%, 95%, 96%, 97%, 98%, 99%, or 100% identical to the amino acid sequence of SEQ ID NO: 123. In some embodiments, the catalytic domain comprises an amino acid sequence at least 80%, 81%, 82%, 83%, 84%, 85%, 86%, 87%, 88%, 89%, 90%, 91%, 92%, 93%, 94%, 95%, 96%, 97%, 98%, 99%, or 100% identical to the amino acid sequence of SEQ ID NO: 124. In some embodiments, the catalytic domain comprises an amino acid sequence at least 80%, 81%, 82%, 83%, 84%, 85%, 86%, 87%, 88%, 89%, 90%, 91%, 92%, 93%, 94%, 95%, 96%, 97%, 98%, 99%, or 100% identical to the amino acid sequence of SEQ ID NO: 125. In some embodiments, the catalytic domain comprises an amino acid sequence at least 80%, 81%, 82%, 83%, 84%, 85%, 86%, 87%, 88%, 89%, 90%, 91%, 92%, 93%, 94%, 95%, 96%, 97%, 98%, 99%, or 100% identical to the amino acid sequence of SEQ ID NO: 126. In some embodiments, the catalytic domain comprises an amino acid sequence at least 80%, 81%, 82%, 83%, 84%, 85%, 86%, 87%, 88%, 89%, 90%, 91%, 92%, 93%, 94%, 95%, 96%, 97%, 98%, 99%, or 100% identical to the amino acid sequence of SEQ ID NO: 127. In some embodiments, the catalytic domain comprises an amino acid sequence at least 80%, 81%, 82%, 83%, 84%, 85%, 86%, 87%, 88%, 89%, 90%, 91%, 92%, 93%, 94%, 95%, 96%, 97%, 98%, 99%, or 100% identical to the amino acid sequence of SEQ ID NO: 128. In some embodiments, the catalytic domain comprises an amino acid sequence at least 80%, 81%, 82%, 83%, 84%, 85%, 86%, 87%, 88%, 89%, 90%, 91%, 92%, 93%, 94%, 95%, 96%, 97%, 98%, 99%, or 100% identical to the amino acid sequence of SEQ ID NO: 129. In some embodiments, the catalytic domain comprises an amino acid sequence at least 80%, 81%, 82%, 83%, 84%, 85%, 86%, 87%, 88%, 89%, 90%, 91%, 92%, 93%, 94%, 95%, 96%, 97%, 98%, 99%, or 100% identical to the amino acid sequence of SEQ ID NO: 130. In some embodiments, the catalytic domain comprises an amino acid sequence at least 80%, 81%, 82%, 83%, 84%, 85%, 86%, 87%, 88%, 89%, 90%, 91%, 92%, 93%, 94%, 95%, 96%, 97%, 98%, 99%, or 100% identical to the amino acid sequence of SEQ ID NO: 131. In some embodiments, the catalytic domain comprises an amino acid sequence at least 80%, 81%, 82%, 83%, 84%, 85%, 86%, 87%, 88%, 89%, 90%, 91%, 92%, 93%, 94%, 95%, 96%, 97%, 98%, 99%, or 100% identical to the amino acid sequence of SEQ ID NO: 132. In some embodiments, the catalytic domain comprises an amino acid sequence at least 80%, 81%, 82%, 83%, 84%, 85%, 86%, 87%, 88%, 89%, 90%, 91%, 92%, 93%, 94%, 95%, 96%, 97%, 98%, 99%, or 100% identical to the amino acid sequence of SEQ ID NO: 133. In some embodiments, the catalytic domain comprises an amino acid sequence at least 80%, 81%, 82%, 83%, 84%, 85%, 86%, 87%, 88%, 89%, 90%, 91%, 92%, 93%, 94%, 95%, 96%, 97%, 98%, 99%, or 100% identical to the amino acid sequence of SEQ ID NO: 134. In some embodiments, the catalytic domain comprises an amino acid sequence at least 80%, 81%, 82%, 83%, 84%, 85%, 86%, 87%, 88%, 89%, 90%, 91%, 92%, 93%, 94%, 95%, 96%, 97%, 98%, 99%, or 100% identical to the amino acid sequence of SEQ ID NO: 135. In some embodiments, the catalytic domain comprises an amino acid sequence at least 80%, 81%, 82%, 83%, 84%, 85%, 86%, 87%, 88%, 89%, 90%, 91%, 92%, 93%, 94%, 95%, 96%, 97%, 98%, 99%, or 100% identical to the amino acid sequence of SEQ ID NO: 136. In some embodiments, the catalytic domain comprises an amino acid sequence at least 80%, 81%, 82%, 83%, 84%, 85%, 86%, 87%, 88%, 89%, 90%, 91%, 92%, 93%, 94%, 95%, 96%, 97%, 98%, 99%, or 100% identical to the amino acid sequence of SEQ ID NO: 137. In some embodiments, the catalytic domain comprises an amino acid sequence at least 80%, 81%, 82%, 83%, 84%, 85%, 86%, 87%, 88%, 89%, 90%, 91%, 92%, 93%, 94%, 95%, 96%, 97%, 98%, 99%, or 100% identical to the amino acid sequence of SEQ ID NO: 138. In some embodiments, the catalytic domain comprises an amino acid sequence at least 80%, 81%, 82%, 83%, 84%, 85%, 86%, 87%, 88%, 89%, 90%, 91%, 92%, 93%, 94%, 95%, 96%, 97%, 98%, 99%, or 100% identical to the amino acid sequence of SEQ ID NO: 139. In some embodiments, the catalytic domain comprises an amino acid sequence at least 80%, 81%, 82%, 83%, 84%, 85%, 86%, 87%, 88%, 89%, 90%, 91%, 92%, 93%, 94%, 95%, 96%, 97%, 98%, 99%, or 100% identical to the amino acid sequence of SEQ ID NO: 140. In some embodiments, the catalytic domain comprises an amino acid sequence at least 80%, 81%, 82%, 83%, 84%, 85%, 86%, 87%, 88%, 89%, 90%, 91%, 92%, 93%, 94%, 95%, 96%, 97%, 98%, 99%, or 100% identical to the amino acid sequence of SEQ ID NO: 141. In some embodiments, the catalytic domain comprises an amino acid sequence at least 80%, 81%, 82%, 83%, 84%, 85%, 86%, 87%, 88%, 89%, 90%, 91%, 92%, 93%, 94%, 95%, 96%, 97%, 98%, 99%, or 100% identical to the amino acid sequence of SEQ ID NO: 142. In some embodiments, the catalytic domain comprises an amino acid sequence at least 80%, 81%, 82%, 83%, 84%, 85%, 86%, 87%, 88%, 89%, 90%, 91%, 92%, 93%, 94%, 95%, 96%, 97%, 98%, 99%, or 100% identical to the amino acid sequence of SEQ ID NO: 143. In some embodiments, the catalytic domain comprises an amino acid sequence at least 80%, 81%, 82%, 83%, 84%, 85%, 86%, 87%, 88%, 89%, 90%, 91%, 92%, 93%, 94%, 95%, 96%, 97%, 98%, 99%, or 100% identical to the amino acid sequence of SEQ ID NO: 144. In some embodiments, the catalytic domain comprises an amino acid sequence at least 80%, 81%, 82%, 83%, 84%, 85%, 86%, 87%, 88%, 89%, 90%, 91%, 92%, 93%, 94%, 95%, 96%, 97%, 98%, 99%, or 100% identical to the amino acid sequence of SEQ ID NO: 145. In some embodiments, the catalytic domain comprises an amino acid sequence at least 80%, 81%, 82%, 83%, 84%, 85%, 86%, 87%, 88%, 89%, 90%, 91%, 92%, 93%, 94%, 95%, 96%, 97%, 98%, 99%, or 100% identical to the amino acid sequence of SEQ ID NO: 146. In some embodiments, the catalytic domain comprises an amino acid sequence at least 80%, 81%, 82%, 83%, 84%, 85%, 86%, 87%, 88%, 89%, 90%, 91%, 92%, 93%, 94%, 95%, 96%, 97%, 98%, 99%, or 100% identical to the amino acid sequence of SEQ ID NO: 147. In some embodiments, the catalytic domain comprises an amino acid sequence at least 80%, 81%, 82%, 83%, 84%, 85%, 86%, 87%, 88%, 89%, 90%, 91%, 92%, 93%, 94%, 95%, 96%, 97%, 98%, 99%, or 100% identical to the amino acid sequence of SEQ ID NO: 148. In some embodiments, the catalytic domain comprises an amino acid sequence at least 80%, 81%, 82%, 83%, 84%, 85%, 86%, 87%, 88%, 89%, 90%, 91%, 92%, 93%, 94%, 95%, 96%, 97%, 98%, 99%, or 100% identical to the amino acid sequence of SEQ ID NO: 149. In some embodiments, the catalytic domain comprises an amino acid sequence at least 80%, 81%, 82%, 83%, 84%, 85%, 86%, 87%, 88%, 89%, 90%, 91%, 92%, 93%, 94%, 95%, 96%, 97%, 98%, 99%, or 100% identical to the amino acid sequence of SEQ ID NO: 150. In some embodiments, the catalytic domain comprises an amino acid sequence at least 80%, 81%, 82%, 83%, 84%, 85%, 86%, 87%, 88%, 89%, 90%, 91%, 92%, 93%, 94%, 95%, 96%, 97%, 98%, 99%, or 100% identical to the amino acid sequence of SEQ ID NO: 151. In some embodiments, the catalytic domain comprises an amino acid sequence at least 80%, 81%, 82%, 83%, 84%, 85%, 86%, 87%, 88%, 89%, 90%, 91%, 92%, 93%, 94%, 95%, 96%, 97%, 98%, 99%, or 100% identical to the amino acid sequence of SEQ ID NO: 152. In some embodiments, the catalytic domain comprises an amino acid sequence at least 80%, 81%, 82%, 83%, 84%, 85%, 86%, 87%, 88%, 89%, 90%, 91%, 92%, 93%, 94%, 95%, 96%, 97%, 98%, 99%, or 100% identical to the amino acid sequence of SEQ ID NO: 153. In some embodiments, the catalytic domain comprises an amino acid sequence at least 80%, 81%, 82%, 83%, 84%, 85%, 86%, 87%, 88%, 89%, 90%, 91%, 92%, 93%, 94%, 95%, 96%, 97%, 98%, 99%, or 100% identical to the amino acid sequence of SEQ ID NO: 154. In some embodiments, the catalytic domain comprises an amino acid sequence at least 80%, 81%, 82%, 83%, 84%, 85%, 86%, 87%, 88%, 89%, 90%, 91%, 92%, 93%, 94%, 95%, 96%, 97%, 98%, 99%, or 100% identical to the amino acid sequence of SEQ ID NO: 155. In some embodiments, the catalytic domain comprises an amino acid sequence at least 80%, 81%, 82%, 83%, 84%, 85%, 86%, 87%, 88%, 89%, 90%, 91%, 92%, 93%, 94%, 95%, 96%, 97%, 98%, 99%, or 100% identical to the amino acid sequence of SEQ ID NO: 156. In some embodiments, the catalytic domain comprises an amino acid sequence at least 80%, 81%, 82%, 83%, 84%, 85%, 86%, 87%, 88%, 89%, 90%, 91%, 92%, 93%, 94%, 95%, 96%, 97%, 98%, 99%, or 100% identical to the amino acid sequence of SEQ ID NO: 157. In some embodiments, the catalytic domain comprises an amino acid sequence at least 80%, 81%, 82%, 83%, 84%, 85%, 86%, 87%, 88%, 89%, 90%, 91%, 92%, 93%, 94%, 95%, 96%, 97%, 98%, 99%, or 100% identical to the amino acid sequence of SEQ ID NO: 158. In some embodiments, the catalytic domain comprises an amino acid sequence at least 80%, 81%, 82%, 83%, 84%, 85%, 86%, 87%, 88%, 89%, 90%, 91%, 92%, 93%, 94%, 95%, 96%, 97%, 98%, 99%, or 100% identical to the amino acid sequence of SEQ ID NO: 159. In some embodiments, the catalytic domain comprises an amino acid sequence at least 80%, 81%, 82%, 83%, 84%, 85%, 86%, 87%, 88%, 89%, 90%, 91%, 92%, 93%, 94%, 95%, 96%, 97%, 98%, 99%, or 100% identical to the amino acid sequence of SEQ ID NO: 160. In some embodiments, the catalytic domain comprises an amino acid sequence at least 80%, 81%, 82%, 83%, 84%, 85%, 86%, 87%, 88%, 89%, 90%, 91%, 92%, 93%, 94%, 95%, 96%, 97%, 98%, 99%, or 100% identical to the amino acid sequence of SEQ ID NO: 161. In some embodiments, the catalytic domain comprises an amino acid sequence at least 80%, 81%, 82%, 83%, 84%, 85%, 86%, 87%, 88%, 89%, 90%, 91%, 92%, 93%, 94%, 95%, 96%, 97%, 98%, 99%, or 100% identical to the amino acid sequence of SEQ ID NO: 162. In some embodiments, the catalytic domain comprises an amino acid sequence at least 80%, 81%, 82%, 83%, 84%, 85%, 86%, 87%, 88%, 89%, 90%, 91%, 92%, 93%, 94%, 95%, 96%, 97%, 98%, 99%, or 100% identical to the amino acid sequence of SEQ ID NO: 163. In some embodiments, the catalytic domain comprises an amino acid sequence at least 80%, 81%, 82%, 83%, 84%, 85%, 86%, 87%, 88%, 89%, 90%, 91%, 92%, 93%, 94%, 95%, 96%, 97%, 98%, 99%, or 100% identical to the amino acid sequence of SEQ ID NO: 164. In some embodiments, the catalytic domain comprises an amino acid sequence at least 80%, 81%, 82%, 83%, 84%, 85%, 86%, 87%, 88%, 89%, 90%, 91%, 92%, 93%, 94%, 95%, 96%, 97%, 98%, 99%, or 100% identical to the amino acid sequence of SEQ ID NO: 165. In some embodiments, the catalytic domain comprises an amino acid sequence at least 80%, 81%, 82%, 83%, 84%, 85%, 86%, 87%, 88%, 89%, 90%, 91%, 92%, 93%, 94%, 95%, 96%, 97%, 98%, 99%, or 100% identical to the amino acid sequence of SEQ ID NO: 166. In some embodiments, the catalytic domain comprises an amino acid sequence at least 80%, 81%, 82%, 83%, 84%, 85%, 86%, 87%, 88%, 89%, 90%, 91%, 92%, 93%, 94%, 95%, 96%, 97%, 98%, 99%, or 100% identical to the amino acid sequence of SEQ ID NO: 167. In some embodiments, the catalytic domain comprises an amino acid sequence at least 80%, 81%, 82%, 83%, 84%, 85%, 86%, 87%, 88%, 89%, 90%, 91%, 92%, 93%, 94%, 95%, 96%, 97%, 98%, 99%, or 100% identical to the amino acid sequence of SEQ ID NO: 168. In some embodiments, the catalytic domain comprises an amino acid sequence at least 80%, 81%, 82%, 83%, 84%, 85%, 86%, 87%, 88%, 89%, 90%, 91%, 92%, 93%, 94%, 95%, 96%, 97%, 98%, 99%, or 100% identical to the amino acid sequence of SEQ ID NO: 169. In some embodiments, the catalytic domain comprises an amino acid sequence at least 80%, 81%, 82%, 83%, 84%, 85%, 86%, 87%, 88%, 89%, 90%, 91%, 92%, 93%, 94%, 95%, 96%, 97%, 98%, 99%, or 100% identical to the amino acid sequence of SEQ ID NO: 170. In some embodiments, the catalytic domain comprises an amino acid sequence at least 80%, 81%, 82%, 83%, 84%, 85%, 86%, 87%, 88%, 89%, 90%, 91%, 92%, 93%, 94%, 95%, 96%, 97%, 98%, 99%, or 100% identical to the amino acid sequence of SEQ ID NO: 171. In some embodiments, the catalytic domain comprises an amino acid sequence at least 80%, 81%, 82%, 83%, 84%, 85%, 86%, 87%, 88%, 89%, 90%, 91%, 92%, 93%, 94%, 95%, 96%, 97%, 98%, 99%, or 100% identical to the amino acid sequence of SEQ ID NO: 172. In some embodiments, the catalytic domain comprises an amino acid sequence at least 80%, 81%, 82%, 83%, 84%, 85%, 86%, 87%, 88%, 89%, 90%, 91%, 92%, 93%, 94%, 95%, 96%, 97%, 98%, 99%, or 100% identical to the amino acid sequence of SEQ ID NO: 173. In some embodiments, the catalytic domain comprises an amino acid sequence at least 80%, 81%, 82%, 83%, 84%, 85%, 86%, 87%, 88%, 89%, 90%, 91%, 92%, 93%, 94%, 95%, 96%, 97%, 98%, 99%, or 100% identical to the amino acid sequence of SEQ ID NO: 174. In some embodiments, the catalytic domain comprises an amino acid sequence at least 80%, 81%, 82%, 83%, 84%, 85%, 86%, 87%, 88%, 89%, 90%, 91%, 92%, 93%, 94%, 95%, 96%, 97%, 98%, 99%, or 100% identical to the amino acid sequence of SEQ ID NO: 175. In some embodiments, the catalytic domain comprises an amino acid sequence at least 80%, 81%, 82%, 83%, 84%, 85%, 86%, 87%, 88%, 89%, 90%, 91%, 92%, 93%, 94%, 95%, 96%, 97%, 98%, 99%, or 100% identical to the amino acid sequence of SEQ ID NO: 176. In some embodiments, the catalytic domain comprises an amino acid sequence at least 80%, 81%, 82%, 83%, 84%, 85%, 86%, 87%, 88%, 89%, 90%, 91%, 92%, 93%, 94%, 95%, 96%, 97%, 98%, 99%, or 100% identical to the amino acid sequence of SEQ ID NO: 177. In some embodiments, the catalytic domain comprises an amino acid sequence at least 80%, 81%, 82%, 83%, 84%, 85%, 86%, 87%, 88%, 89%, 90%, 91%, 92%, 93%, 94%, 95%, 96%, 97%, 98%, 99%, or 100% identical to the amino acid sequence of SEQ ID NO: 178. In some embodiments, the catalytic domain comprises an amino acid sequence at least 80%, 81%, 82%, 83%, 84%, 85%, 86%, 87%, 88%, 89%, 90%, 91%, 92%, 93%, 94%, 95%, 96%, 97%, 98%, 99%, or 100% identical to the amino acid sequence of SEQ ID NO: 179. In some embodiments, the catalytic domain comprises an amino acid sequence at least 80%, 81%, 82%, 83%, 84%, 85%, 86%, 87%, 88%, 89%, 90%, 91%, 92%, 93%, 94%, 95%, 96%, 97%, 98%, 99%, or 100% identical to the amino acid sequence of SEQ ID NO: 180. In some embodiments, the catalytic domain comprises an amino acid sequence at least 80%, 81%, 82%, 83%, 84%, 85%, 86%, 87%, 88%, 89%, 90%, 91%, 92%, 93%, 94%, 95%, 96%, 97%, 98%, 99%, or 100% identical to the amino acid sequence of SEQ ID NO: 181. In some embodiments, the catalytic domain comprises an amino acid sequence at least 80%, 81%, 82%, 83%, 84%, 85%, 86%, 87%, 88%, 89%, 90%, 91%, 92%, 93%, 94%, 95%, 96%, 97%, 98%, 99%, or 100% identical to the amino acid sequence of SEQ ID NO: 182. In some embodiments, the catalytic domain comprises an amino acid sequence at least 80%, 81%, 82%, 83%, 84%, 85%, 86%, 87%, 88%, 89%, 90%, 91%, 92%, 93%, 94%, 95%, 96%, 97%, 98%, 99%, or 100% identical to the amino acid sequence of SEQ ID NO: 183. In some embodiments, the catalytic domain comprises an amino acid sequence at least 80%, 81%, 82%, 83%, 84%, 85%, 86%, 87%, 88%, 89%, 90%, 91%, 92%, 93%, 94%, 95%, 96%, 97%, 98%, 99%, or 100% identical to the amino acid sequence of SEQ ID NO: 184. In some embodiments, the catalytic domain comprises an amino acid sequence at least 80%, 81%, 82%, 83%, 84%, 85%, 86%, 87%, 88%, 89%, 90%, 91%, 92%, 93%, 94%, 95%, 96%, 97%, 98%, 99%, or 100% identical to the amino acid sequence of SEQ ID NO: 185. In some embodiments, the catalytic domain comprises an amino acid sequence at least 80%, 81%, 82%, 83%, 84%, 85%, 86%, 87%, 88%, 89%, 90%, 91%, 92%, 93%, 94%, 95%, 96%, 97%, 98%, 99%, or 100% identical to the amino acid sequence of SEQ ID NO: 186. In some embodiments, the catalytic domain comprises an amino acid sequence at least 80%, 81%, 82%, 83%, 84%, 85%, 86%, 87%, 88%, 89%, 90%, 91%, 92%, 93%, 94%, 95%, 96%, 97%, 98%, 99%, or 100% identical to the amino acid sequence of SEQ ID NO: 187. In some embodiments, the catalytic domain comprises an amino acid sequence at least 80%, 81%, 82%, 83%, 84%, 85%, 86%, 87%, 88%, 89%, 90%, 91%, 92%, 93%, 94%, 95%, 96%, 97%, 98%, 99%, or 100% identical to the amino acid sequence of SEQ ID NO: 188. In some embodiments, the catalytic domain comprises an amino acid sequence at least 80%, 81%, 82%, 83%, 84%, 85%, 86%, 87%, 88%, 89%, 90%, 91%, 92%, 93%, 94%, 95%, 96%, 97%, 98%, 99%, or 100% identical to the amino acid sequence of SEQ ID NO: 189. In some embodiments, the catalytic domain comprises an amino acid sequence at least 80%, 81%, 82%, 83%, 84%, 85%, 86%, 87%, 88%, 89%, 90%, 91%, 92%, 93%, 94%, 95%, 96%, 97%, 98%, 99%, or 100% identical to the amino acid sequence of SEQ ID NO: 190. In some embodiments, the catalytic domain comprises an amino acid sequence at least 80%, 81%, 82%, 83%, 84%, 85%, 86%, 87%, 88%, 89%, 90%, 91%, 92%, 93%, 94%, 95%, 96%, 97%, 98%, 99%, or 100% identical to the amino acid sequence of SEQ ID NO: 191. In some embodiments, the catalytic domain comprises an amino acid sequence at least 80%, 81%, 82%, 83%, 84%, 85%, 86%, 87%, 88%, 89%, 90%, 91%, 92%, 93%, 94%, 95%, 96%, 97%, 98%, 99%, or 100% identical to the amino acid sequence of SEQ ID NO: 192. In some embodiments, the catalytic domain comprises an amino acid sequence at least 80%, 81%, 82%, 83%, 84%, 85%, 86%, 87%, 88%, 89%, 90%, 91%, 92%, 93%, 94%, 95%, 96%, 97%, 98%, 99%, or 100% identical to the amino acid sequence of SEQ ID NO: 193. In some embodiments, the catalytic domain comprises an amino acid sequence at least 80%, 81%, 82%, 83%, 84%, 85%, 86%, 87%, 88%, 89%, 90%, 91%, 92%, 93%, 94%, 95%, 96%, 97%, 98%, 99%, or 100% identical to the amino acid sequence of SEQ ID NO: 194. In some embodiments, the catalytic domain comprises an amino acid sequence at least 80%, 81%, 82%, 83%, 84%, 85%, 86%, 87%, 88%, 89%, 90%, 91%, 92%, 93%, 94%, 95%, 96%, 97%, 98%, 99%, or 100% identical to the amino acid sequence of SEQ ID NO: 195. In some embodiments, the catalytic domain comprises an amino acid sequence at least 80%, 81%, 82%, 83%, 84%, 85%, 86%, 87%, 88%, 89%, 90%, 91%, 92%, 93%, 94%, 95%, 96%, 97%, 98%, 99%, or 100% identical to the amino acid sequence of SEQ ID NO: 196. In some embodiments, the catalytic domain comprises an amino acid sequence at least 80%, 81%, 82%, 83%, 84%, 85%, 86%, 87%, 88%, 89%, 90%, 91%, 92%, 93%, 94%, 95%, 96%, 97%, 98%, 99%, or 100% identical to the amino acid sequence of SEQ ID NO: 197. In some embodiments, the catalytic domain comprises an amino acid sequence at least 80%, 81%, 82%, 83%, 84%, 85%, 86%, 87%, 88%, 89%, 90%, 91%, 92%, 93%, 94%, 95%, 96%, 97%, 98%, 99%, or 100% identical to the amino acid sequence of SEQ ID NO: 198. In some embodiments, the catalytic domain comprises an amino acid sequence at least 80%, 81%, 82%, 83%, 84%, 85%, 86%, 87%, 88%, 89%, 90%, 91%, 92%, 93%, 94%, 95%, 96%, 97%, 98%, 99%, or 100% identical to the amino acid sequence of SEQ ID NO: 199. In some embodiments, the catalytic domain comprises an amino acid sequence at least 80%, 81%, 82%, 83%, 84%, 85%, 86%, 87%, 88%, 89%, 90%, 91%, 92%, 93%, 94%, 95%, 96%, 97%, 98%, 99%, or 100% identical to the amino acid sequence of SEQ ID NO: 200. In some embodiments, the catalytic domain comprises an amino acid sequence at least 80%, 81%, 82%, 83%, 84%, 85%, 86%, 87%, 88%, 89%, 90%, 91%, 92%, 93%, 94%, 95%, 96%, 97%, 98%, 99%, or 100% identical to the amino acid sequence of SEQ ID NO: 201. In some embodiments, the catalytic domain comprises an amino acid sequence at least 80%, 81%, 82%, 83%, 84%, 85%, 86%, 87%, 88%, 89%, 90%, 91%, 92%, 93%, 94%, 95%, 96%, 97%, 98%, 99%, or 100% identical to the amino acid sequence of SEQ ID NO: 202. In some embodiments, the catalytic domain comprises an amino acid sequence at least 80%, 81%, 82%, 83%, 84%, 85%, 86%, 87%, 88%, 89%, 90%, 91%, 92%, 93%, 94%, 95%, 96%, 97%, 98%, 99%, or 100% identical to the amino acid sequence of SEQ ID NO: 203. In some embodiments, the catalytic domain comprises an amino acid sequence at least 80%, 81%, 82%, 83%, 84%, 85%, 86%, 87%, 88%, 89%, 90%, 91%, 92%, 93%, 94%, 95%, 96%, 97%, 98%, 99%, or 100% identical to the amino acid sequence of SEQ ID NO: 204. In some embodiments, the catalytic domain comprises an amino acid sequence at least 80%, 81%, 82%, 83%, 84%, 85%, 86%, 87%, 88%, 89%, 90%, 91%, 92%, 93%, 94%, 95%, 96%, 97%, 98%, 99%, or 100% identical to the amino acid sequence of SEQ ID NO: 205. In some embodiments, the catalytic domain comprises an amino acid sequence at least 80%, 81%, 82%, 83%, 84%, 85%, 86%, 87%, 88%, 89%, 90%, 91%, 92%, 93%, 94%, 95%, 96%, 97%, 98%, 99%, or 100% identical to the amino acid sequence of SEQ ID NO: 206. In some embodiments, the catalytic domain comprises an amino acid sequence at least 80%, 81%, 82%, 83%, 84%, 85%, 86%, 87%, 88%, 89%, 90%, 91%, 92%, 93%, 94%, 95%, 96%, 97%, 98%, 99%, or 100% identical to the amino acid sequence of SEQ ID NO: 207. In some embodiments, the catalytic domain comprises an amino acid sequence at least 80%, 81%, 82%, 83%, 84%, 85%, 86%, 87%, 88%, 89%, 90%, 91%, 92%, 93%, 94%, 95%, 96%, 97%, 98%, 99%, or 100% identical to the amino acid sequence of SEQ ID NO: 208. In some embodiments, the catalytic domain comprises an amino acid sequence at least 80%, 81%, 82%, 83%, 84%, 85%, 86%, 87%, 88%, 89%, 90%, 91%, 92%, 93%, 94%, 95%, 96%, 97%, 98%, 99%, or 100% identical to the amino acid sequence of SEQ ID NO: 209. In some embodiments, the catalytic domain comprises an amino acid sequence at least 80%, 81%, 82%, 83%, 84%, 85%, 86%, 87%, 88%, 89%, 90%, 91%, 92%, 93%, 94%, 95%, 96%, 97%, 98%, 99%, or 100% identical to the amino acid sequence of SEQ ID NO: 210. In some embodiments, the catalytic domain comprises an amino acid sequence at least 80%, 81%, 82%, 83%, 84%, 85%, 86%, 87%, 88%, 89%, 90%, 91%, 92%, 93%, 94%, 95%, 96%, 97%, 98%, 99%, or 100% identical to the amino acid sequence of SEQ ID NO: 211. In some embodiments, the catalytic domain comprises an amino acid sequence at least 80%, 81%, 82%, 83%, 84%, 85%, 86%, 87%, 88%, 89%, 90%, 91%, 92%, 93%, 94%, 95%, 96%, 97%, 98%, 99%, or 100% identical to the amino acid sequence of SEQ ID NO: 212. In some embodiments, the catalytic domain comprises an amino acid sequence at least 80%, 81%, 82%, 83%, 84%, 85%, 86%, 87%, 88%, 89%, 90%, 91%, 92%, 93%, 94%, 95%, 96%, 97%, 98%, 99%, or 100% identical to the amino acid sequence of SEQ ID NO: 213. In some embodiments, the catalytic domain comprises an amino acid sequence at least 80%, 81%, 82%, 83%, 84%, 85%, 86%, 87%, 88%, 89%, 90%, 91%, 92%, 93%, 94%, 95%, 96%, 97%, 98%, 99%, or 100% identical to the amino acid sequence of SEQ ID NO: 214. In some embodiments, the catalytic domain comprises an amino acid sequence at least 80%, 81%, 82%, 83%, 84%, 85%, 86%, 87%, 88%, 89%, 90%, 91%, 92%, 93%, 94%, 95%, 96%, 97%, 98%, 99%, or 100% identical to the amino acid sequence of SEQ ID NO: 215. In some embodiments, the catalytic domain comprises an amino acid sequence at least 80%, 81%, 82%, 83%, 84%, 85%, 86%, 87%, 88%, 89%, 90%, 91%, 92%, 93%, 94%, 95%, 96%, 97%, 98%, 99%, or 100% identical to the amino acid sequence of SEQ ID NO: 216. In some embodiments, the catalytic domain comprises an amino acid sequence at least 80%, 81%, 82%, 83%, 84%, 85%, 86%, 87%, 88%, 89%, 90%, 91%, 92%, 93%, 94%, 95%, 96%, 97%, 98%, 99%, or 100% identical to the amino acid sequence of SEQ ID NO: 217. In some embodiments, the catalytic domain comprises an amino acid sequence at least 80%, 81%, 82%, 83%, 84%, 85%, 86%, 87%, 88%, 89%, 90%, 91%, 92%, 93%, 94%, 95%, 96%, 97%, 98%, 99%, or 100% identical to the amino acid sequence of SEQ ID NO: 218. In some embodiments, the catalytic domain comprises an amino acid sequence at least 80%, 81%, 82%, 83%, 84%, 85%, 86%, 87%, 88%, 89%, 90%, 91%, 92%, 93%, 94%, 95%, 96%, 97%, 98%, 99%, or 100% identical to the amino acid sequence of SEQ ID NO: 219. In some embodiments, the catalytic domain comprises an amino acid sequence at least 80%, 81%, 82%, 83%, 84%, 85%, 86%, 87%, 88%, 89%, 90%, 91%, 92%, 93%, 94%, 95%, 96%, 97%, 98%, 99%, or 100% identical to the amino acid sequence of SEQ ID NO: 220. In some embodiments, the catalytic domain comprises an amino acid sequence at least 80%, 81%, 82%, 83%, 84%, 85%, 86%, 87%, 88%, 89%, 90%, 91%, 92%, 93%, 94%, 95%, 96%, 97%, 98%, 99%, or 100% identical to the amino acid sequence of SEQ ID NO: 286.

[0192] Table 1 below describes, the amino acid sequence of exemplary human deubiquitinases and exemplary catalytic domains of the exemplary human deubiquitinases. The catalytic domains are exemplary. A person of ordinary skill in the art could readily determine a sufficient amino acid sequence of a human deubiquitinase to mediate deubiquitination (e.g., a catalytic domain). Any of the human deubiquitinases (functional fragment or variants thereof) may be used to derive a catalytic domain for use in a fusion protein described herein.

TABLE 1
The amino acid sequence of exemplary human deubiquitinases and exemplary catalytic
domains of the same

| | SEQ | | SEQ | Exemplary Catalytic Domains |
|---|---|---|---|---|
| Description | ID NO | Amino Acid Sequence | ID NO | (Amino Acid Sequence) |
| UBP27_HUMAN | 1 | MCKDYVYDKDIEQIAKEEQGEA | 113 | SSFTIGLRGLINLGNTCEMN |
| Ubiquitin | | LKLQASTSTEVSHQQCSVPGLG | | CIVQALTHTPILRDFFLSDR |
| carboxyl- | | EKFPTWETTKPELELLGHNPRR | | HRCEMPSPELCLVCEMSSLF |
| terminal | | RRITSSFTIGLRGLINLGNTCF | | RELYSGNPSPHVPYKLLHLV |
| hydrolase 27 | | MNCIVQALTHTPILRDFFLSDR | | WIHARHLAGYRQQDAHEFLI |
| | | HRCEMPSPELCLVCEMSSLFRE | | AALDVLHRHCKGDDVGKAAN |
| | | LYSGNPSPHVPYKLLHLVWIHA | | NPNHCNCIIDQIFTGGLQSD |
| | | RHLAGYRQQDAHEFLIAALDVL | | VTCQACHGVSTTIDPCWDIS |
| | | HRHCKGDDVGKAANNPNHCNCI | | LDLPGSCTSFWPMSPGRESS |
| | | IDQIFTGGLQSDVTCQACHGVS | | VNGESHIPGITTLTDCLRRF |
| | | TTIDPCWDISLDLPGSCTSFWP | | TRPEHLGSSAKIKCGSCQSY |
| | | MSPGRESSVNGESHIPGITTLT | | QESTKQLTMNKLPVVACFHF |
| | | DCLRRFTRPEHLGSSAKIKCGS | | KRFEHSAKQRRKITTYISFP |
| | | CQSYQESTKQLTMNKLPVVACE | | LELDMTPEMASSKESRMNGQ |
| | | HFKRFEHSAKQRRKITTYISFP | | LQLPTNSGNNENKYSLFAVV |
| | | LELDMTPFMASSKESRMNGQLQ | | NHQGTLESGHYTSFIRHHKD |
| | | LPTNSGNNENKYSLFAVVNHQG | | QWFKCDDAVITKASIKDVLD |
| | | TLESGHYTSFIRHHKDQWEKCD | | SEGYLLFYHKQVLEHESEKV |
| | | DAVITKASIKDVLDSEGYLLFY | | KEMNTQAY |
| | | HKQVLEHESEKVKEMNTQAY | | |
| UBP48_HUMAN | 2 | MAPRLQLEKAAWRWAETVRPEE | 114 | NSFHNIDDPNCERRKKNSFV |
| Ubiquitin | | VSQEHIETAYRIWLEPCIRGVC | | GLTNLGATCYVNTFLQVWEL |
| carboxyl- | | RRNCKGNPNCLVGIGEHIWLGE | | NLELRQALYLCPSTCSDYML |
| terminal | | IDENSFHNIDDPNCERRKKNSF | | GDGIQEEKDYEPQTICEHLQ |
| hydrolase 48 | | VGLTNLGATCYVNTFLQVWELN | | YLFALLQNSNRRYIDPSGFV |
| | | LELRQALYLCPSTCSDYMLGDG | | KALGLDTGQQQDAQEFSKLE |
| | | IQEEKDYEPQTICEHLQYLFAL | | MSLLEDTLSKQKNPDVRNIV |
| | | LQNSNRRYIDPSGFVKALGLDT | | QQQFCGEYAYVTVCNQCGRE |
| | | GQQQDAQEFSKLFMSLLEDTLS | | SKLLSKFYELELNIQGHKQL |
| | | KQKNPDVRNIVQQQFCGEYAYV | | TDCISEFLKEEKLEGDNRYE |
| | | TVCNQCGRESKLLSKFYELELN | | CENCQSKQNATRKIRLLSLP |
| | | IQGHKQLTDCISEFLKEEKLEG | | CTLNLQLMRFVEDRQTGHKK |
| | | DNRYFCENCQSKQNATRKIRLL | | KLNTYIGFSEILDMEPYVEH |
| | | SLPCTLNLQLMRFVEDRQTGHK | | KGGSYVYELSAVLIHRGVSA |
| | | KKLNTYIGFSEILDMEPYVEHK | | YSGHYIAHVKDPQSGEWYKF |
| | | GGSYVYELSAVLIHRGVSAYSG | | NDEDIEKMEGKKLQLGIEED |
| | | HYIAHVKDPQSGEWYKENDEDI | | LAEPSKSQTRKPKCGKGTHC |
| | | EKMEGKKLQLGIEEDLAEPSKS | | SRNAYMLVYRLQT |
| | | QTRKPKCGKGTHCSRNAYMLVY | | |
| | | RLQTQEKPNTTVQVPAFLQELV | | |
| | | DRDNSKFEEWCIEMAEMRKQSV | | |
| | | DKGKAKHEEVKELYQRLPAGAE | | |
| | | PYEFVSLEWLQKWLDESTPTKP | | |
| | | IDNHACLCSHDKLHPDKISIMK | | |
| | | RISEYAADIFYSRYGGGPRLTV | | |
| | | KALCKECVVERCRILRLKNQLN | | |
| | | EDYKTVNNLLKAAVKGSDGFWV | | |
| | | GKSSLRSWRQLALEQLDEQDGD | | |
| | | AEQSNGKMNGSTLNKDESKEER | | |
| | | KEEEELNENEDILCPHGELCIS | | |
| | | ENERRLVSKEAWSKLQQYFPKA | | |
| | | PEFPSYKECCSQCKILEREGEE | | |
| | | NEALHKMIANEQKTSLPNLFQD | | |
| | | KNRPCLSNWPEDTDVLYIVSQF | | |
| | | FVEEWRKFVRKPTRCSPVSSVG | | |
| | | NSALLCPHGGLMFTFASMTKED | | |
| | | SKLIALIWPSEWQMIQKLFVVD | | |
| | | HVIKITRIEVGDVNPSETQYIS | | |
| | | EPKLCPECREGLLCQQQRDLRE | | |
| | | YTQATIYVHKVVDNKKVMKDSA | | |
| | | PELNVSSSETEEDKEEAKPDGE | | |
| | | KDPDFNQSNGGTKRQKISHQNY | | |
| | | IAYQKQVIRRSMRHRKVRGEKA | | |
| | | LLVSANQTLKELKIQIMHAFSV | | |
| | | APFDQNLSIDGKILSDDCATLG | | |
| | | TLGVIPESVILLKADEPIADYA | | |
| | | AMDDVMQVCMPEEGFKGTGLLG | | |
| | | H | | |
| UBP3_HUMAN | 3 | MECPHLSSSVCIAPDSAKEPNG | 115 | TAICATGLRNLGNTCEMNAI |
| Ubiquitin | | SPSSWCCSVCRSNKSPWVCLTC | | LQSLSNIEQFCCYFKELPAV |
| carboxyl- | | SSVHCGRYVNGHAKKHYEDAQV | | ELRNGKTAGRRTYHTRSQGD |
| terminal | | PLTNHKKSEKQDKVQHTVCMDC | | NNVSLVEEFRKTLCALWQGS |
| hydrolase 3 | | SSYSTYCYRCDDFVVNDTKLGL | | QTAFSPESLFYVVWKIMPNF |
| | | VQKVREHLQNLENSAFTADRHK | | RGYQQQDAHEFMRYLLDHLH |
| | | KRKLLENSTLNSKLLKVNGSTT | | LELQGGENGVSRSAILQENS |
| | | AICATGLRNLGNTCEMNAILQS | | TLSASNKCCINGASTVVTAI |
| | | LSNIEQFCCYFKELPAVELRNG | | FGGILQNEVNCLICGTESRK |
| | | KTAGRRTYHTRSQGDNNVSLVE | | FDPFLDLSLDIPSQFRSKRS |
| | | EFRKTLCALWQGSQTAFSPESL | | KNQENGPVCSLRDCLRSFTD |
| | | FYVVWKIMPNERGYQQQDAHEF | | LEELDETELYMCHKCKKKQK |
| | | MRYLLDHLHLELQGGENGVSRS | | STKKFWIQKLPKVLCLHLKR |
| | | AILQENSTLSASNKCCINGAST | | FHWTAYLRNKVDTYVEFPLR |
| | | VVTAIFGGILQNEVNCLICGTE | | GLDMKCYLLEPENSGPESCL |
| | | SRKFDPFLDLSLDIPSQFERSKR | | YDLAAVVVHHGSGVGSGHYT |
| | | SKNQENGPVCSLRDCLRSFTDL | | AYATHEGRWFHENDSTVTLT |
| | | EELDETELYMCHKCKKKQKSTK | | DEETVVKAKAYILFYVEHQ |
| | | KFWIQKLPKVLCLHLKRFHWTA | | |
| | | YLRNKVDTYVEFPLRGLDMKCY | | |
| | | LLEPENSGPESCLYDLAAVVVH | | |
| | | HGSGVGSGHYTAYATHEGRWFH | | |
| | | FNDSTVTLTDEETVVKAKAYIL | | |
| | | FYVEHQAKAGSDKL | | |
| U17LB_HUMAN | 4 | QLAPREKLPLSSRRPAAVGAGL | 116 | AVGAGLQNMGNTCYVNASLQ |
| Ubiquitin | | QNMGNTCYVNASLQCLTYTPPL | | CLTYTPPLANYMLSREHSQT |
| carboxyl- | | ANYMLSREHSQTCHRHKGCMLC | | CHRHKGCMLCTMQAHITRAL |
| terminal | | TMQAHITRALHNPGHVIQPSQA | | HNPGHVIQPSQALAAGFHRG |
| hydrolase 17- | | LAAGFHRGKQEDAHEFLMFTVD | | KQEDAHEFLMFTVDAMKKAC |
| like protein 11 | | AMKKACLPGHKQVDHHSKDTTL | | LPGHKQVDHHSKDTTLIHQI |
| | | IHQIFGGYWRSQIKCLHCHGIS | | FGGYWRSQIKCLHCHGISDT |
| | | DTFDPYLDIALDIQAAQSVQQA | | FDPYLDIALDIQAAQSVQQA |
| | | LEQLVKPEELNGENAYHCGVCL | | LEQLVKPEELNGENAYHCGV |
| | | QRAPASKTLTLHTSAKVLILVL | | CLQRAPASKTLTLHTSAKVL |
| | | KRFSDVTGNKIAKNVQYPECLD | | ILVLKRFSDVTGNKIAKNVQ |
| | | MQPYMSQTNTGPLVYVLYAVLV | | YPECLDMQPYMSQTNTGPLV |
| | | HAGWSCHNGHYFSYVKAQEGQW | | YVLYAVLVHAGWSCHNGHYF |
| | | YKMDDAEVTASSITSVLSQQAY | | SYVKAQEGQWYKMDDAEVTA |
| | | VLFYIQKSEWERHSESVSRGRE | | SSITSVLSQQAYVLFYIQKS |
| | | PRALGAEDTDRRATQGELKRDH | | |
| | | PCLQAPELDEHLVERATQESTL | | |
| | | DHWKFLQEQNKTKPEFNVRKVE | | |
| | | GTLPPDVLVIHQSKYKCGMKNH | | |
| | | HPEQQSSLLNLSSTTPTHQESM | | |
| | | NTGTLASLRGRARRSKGKNKHS | | |
| | | KRALLVCQ | | |
| UBP1_HUMAN | 5 | MPGVIPSESNGLSRGSPSKKNR | 117 | LPFVGLNNLGNTCYLNSILQ |
| Ubiquitin | | LSLKFFQKKETKRALDFTDSQE | | VLYFCPGFKSGVKHLENIIS |
| carboxyl- | | NEEKASEYRASEIDQVVPAAQS | | RKKEALKDEANQKDKGNCKE |
| terminal | | SPINCEKRENLLPFVGLNNLGN | | DSLASYELICSLQSLIISVE |
| hydrolase 1 | | TCYLNSILQVLYFCPGFKSGVK | | QLQASFLLNPEKYTDELATQ |
| | | HLENIISRKKEALKDEANQKDK | | PRRLLNTLRELNPMYEGYLQ |
| | | GNCKEDSLASYELICSLQSLII | | HDAQEVLQCILGNIQETCQL |
| | | SVEQLQASFLLNPEKYTDELAT | | LKKEEVKNVAELPTKVEEIP |
| | | QPRRLLNTLRELNPMYEGYLQH | | HPKEEMNGINSIEMDSMRHS |
| | | DAQEVLQCILGNIQETCQLLKK | | EDFKEKLPKGNGKRKSDTEF |
| | | EEVKNVAELPTKVEEIPHPKEE | | GNMKKKVKLSKEHQSLEENQ |
| | | MNGINSIEMDSMRHSEDEKEKL | | RQTRSKRKATSDTLESPPKI |
| | | PKGNGKRKSDTEFGNMKKKVKL | | IPKYISENESPRPSQKKSRV |
| | | SKEHQSLEENQRQTRSKRKATS | | KINWLKSATKQPSILSKFCS |
| | | DTLESPPKIIPKYISENESPRP | | LGKITTNQGVKGQSKENECD |
| | | SQKKSRVKINWLKSATKQPSIL | | PEEDLGKCESDNTTNGCGLE |
| | | SKFCSLGKITTNQGVKGQSKEN | | SPGNTVTPVNVNEVKPINKG |
| | | ECDPEEDLGKCESDNTTNGCGL | | EEQIGFELVEKLFQGQLVLR |
| | | ESPGNTVTPVNVNEVKPINKGE | | TRCLECESLTERREDFQDIS |
| | | EQIGFELVEKLFQGQLVLRTRC | | VPVQEDELSKVEESSEISPE |
| | | LECESLTERREDFQDISVPVQE | | PKTEMKTLRWAISQFASVER |
| | | DELSKVEESSEISPEPKTEMKT | | IVGEDKYFCENCHHYTEAER |
| | | LRWAISQFASVERIVGEDKYFC | | SLLEDKMPEVITIHLKCFAA |
| | | ENCHHYTEAERSLLEDKMPEVI | | SGLEFDCYGGGLSKINTPLL |
| | | TIHLKCFAASGLEFDCYGGGLS | | TPLKLSLEEWSTKPTNDSYG |
| | | KINTPLLTPLKLSLEEWSTKPT | | LFAVVMHSGITISSGHYTAS |
| | | NDSYGLFAVVMHSGITISSGHY | | VKVTDLNSLELDKGNFVVDQ |
| | | TASVKVTDLNSLELDKGNFVVD | | MCEIGKPEPLNEEEARGVVE |
| | | QMCEIGKPEPLNEEEARGVVEN | | NYNDEEVSIRVGGNTQPSKV |
| | | YNDEEVSIRVGGNTQPSKVLNK | | LNKKNVEAIGLLGGQKSKAD |
| | | KNVEAIGLLGGQKSKADYELYN | | YELYNKASNPDKVASTAFAE |
| | | KASNPDKVASTAFAENRNSETS | | NRNSETSDTTGTHESDRNKE |
| | | DTTGTHESDRNKESSDQTGINI | | SSDQTGINISGFENKISYVV |
| | | SGFENKISYVVQSLKEYEGKWL | | QSLKEYEGKWLLEDDSEVKV |
| | | LEDDSEVKVTEEKDELNSLSPS | | TEEKDFLNSLSPSTSPTSTP |
| | | TSPTSTPYLLFYKKL | | YLLFYKKI |
| UBP40_HUMAN | 6 | MFGDLFEEEYSTVSNNQYGKGK | 118 | FTNLSGIRNQGGTCYLNSLL |
| Ubiquitin | | KLKTKALEPPAPREFTNLSGIR | | QTLHFTPEFREALESLGPEE |
| carboxyl- | | NQGGTCYLNSLLQTLHFTPEER | | LGLFEDKDKPDAKVRIIPLQ |
| terminal | | EALFSLGPEELGLFEDKDKPDA | | LQRLFAQLLLLDQEAASTAD |
| hydrolase 40 | | KVRIIPLQLQRLFAQLLLLDQE | | LTDSFGWTSNEEMRQHDVQE |
| | | AASTADLTDSFGWTSNEEMRQH | | LNRILFSALETSLVGTSGHD |
| | | DVQELNRILFSALETSLVGTSG | | LIYRLYHGTIVNQIVCKECK |
| | | HDLIYRLYHGTIVNQIVCKECK | | NVSERQEDFLDLTVAVKNVS |
| | | NVSERQEDFLDLTVAVKNVSGL | | GLEDALWNMYVEEEVEDCDN |
| | | EDALWNMYVEEEVEDCDNLYHC | | LYHCGTCDRLVKAAKSAKLR |
| | | GTCDRLVKAAKSAKLRKLPPEL | | KLPPELTVSLLRENEDFVKC |
| | | TVSLLRENEDEVKCERYKETSC | | ERYKETSCYTFPLRINLKPF |
| | | YTFPLRINLKPFCEQSELDDLE | | CEQSELDDLEYIYDLESVII |
| | | YIYDLFSVIIHKGGCYGGHYHV | | HKGG |
| | | YIKDVDHLGNWQFQEEKSKPDV | | CYGGHYHVYIKDVDHLGNWQ |
| | | NLKDLQSEEEIDHPLMILKAIL | | FQEEKSKPDVNLKDLQSEEE |
| | | LEENNLIPVDQLGQKLLKKIGI | | IDHPLMILKAILLEENNLIP |
| | | SWNKKYRKQHGPLRKFLQLHSQ | | VDQLGQKLLKKIGISWNKKY |
| | | IFLLSSDESTVRLLKNSSLQAE | | RKQHGPLRKFLQLHSQIFLL |
| | | SDFQRNDQQIFKMLPPESPGLN | | SSDESTVRLLKNSSLQAESD |
| | | NSISCPHWEDINDSKVQPIREK | | FQRNDQQIFKMLPPESPGLN |
| | | DIEQQFQGKESAYMLFYRKSQL | | NSISCPHWEDINDSKVQPIR |
| | | QRPPEARANPRYGVPCHLLNEM | | EKDIEQQFQGKESAYMLFYR |
| | | DAANIELQTKRAECDSANNTFE | | KSQLQRPPEARANPRYGVPC |
| | | LHLHLGPQYHFFNGALHPVVSQ | | HLLNEMDAANIELQTKRAEC |
| | | TESVWDLTEDKRKTLGDLRQSI | | DSANNTFELHLHLGPQYHFF |
| | | FQLLEFWEGDMVLSVAKLVPAG | | NGALHPVVSQTESVWDLTED |
| | | LHIYQSLGGDELTLCETEIADG | | KRKTLGDLRQSIFQLLEFWE |
| | | EDIFVWNGVEVGGVHIQTGIDC | | GDMVLSVAKLVPAGLHIYQS |
| | | EPLLLNVLHLDTSSDGEKCCQV | | LGGDELTLCETEIADGEDIF |
| | | IESPHVFPANAEVGTVLTALAI | | VWNGVEVGGVHIQTGIDCEP |
| | | PAGVIFINSAGCPGGEGWTAIP | | LLLNVLHLDTSSDGEKCCQV |
| | | KEDMRKTFREQGLRNGSSILIQ | | IESPHVEPANAEVGTVLTAL |
| | | DSHDDNSLLTKEEKWVTSMNEI | | AIPAGVIFINSAGCPGGEGW |
| | | DWLHVKNLCQLESEEKQVKISA | | TAIPKEDMRKTFREQGLRNG |
| | | TVNTMVEDIRIKAIKELKLMKE | | SSILIQDSHDDNSLLTKEEK |
| | | LADNSCLRPIDRNGKLLCPVPD | | WVTSMNEIDWLHVKNLCQLE |
| | | SYTLKEAELKMGSSLGLCLGKA | | SEEKQVKISATVNTMVEDIR |
| | | PSSSQLFLFFAMGSDVQPGTEM | | IKAIKELKLMKELADNSCLR |
| | | EIVVEETISVRDCLKLMLKKSG | | PIDRNGKLLCPVPDSYTLKE |
| | | LQGDAWHLRKMDWCYEAGEPLC | | AELKMGSSLGLCLGKAPSSS |
| | | EEDATLKELLICSGDTLLLIEG | | QLFLFFAMGSDVQPGTEMEI |
| | | QLPPLGELKVPIWWYQLQGPSG | | VVEETISVRDCLKLMLKKSG |
| | | HWESHQDQTNCTSSWGRVWRAT | | LQGDAWHLRKMDWCYEAGEP |
| | | SSQGASGNEPAQVSLLYLGDIE | | LCEEDATLKELLICSGDTLL |
| | | ISEDATLAELKSQAMTLPPFLE | | LIEGQLPPLGFLKVPIWWYQ |
| | | FGVPSPAHLRAWTVERKRPGRL | | LQGPSGHWESHQDQTNCTSS |
| | | LRTDRQPLREYKLGRRIEICLE | | WGRVWRATSSQGASGNEPAQ |
| | | PLQKGENLGPQDVLLRTQVRIP | | VSLLYLGDIEISEDATLAEL |
| | | GERTYAPALDLVWNAAQGGTAG | | KSQAMTLPPFLEFGVPSPAH |
| | | SLRQRVADFYRLPVEKIEIAKY | | LRAWTVERKRPGRLLRTDRQ |
| | | FPEKFEWLPISSWNQQITKRKK | | PLREYKLGRRIEICLEPLQK |
| | | KKKQDYLQGAPYYLKDGDTIGV | | GENLGPQDVLLRTQVRIPGE |
| | | KNLLIDDDDDESTIRDDTGKEK | | RTYAPALDLVWNAAQGGTAG |
| | | QKQRALGRRKSQEALHEQSSYI | | SLRQRVADFYRLPVEKIEIA |
| | | LSSAETPARPRAPETSLSIHVG | | KYFPEKFEWLPISSWNQQIT |
| | | SFR | | KRKKKKKQDYLQGAPYYLKD |
| | | | | GDTIGVKNLLIDDDDDESTI |
| | | | | RDDTGKEKQKQRALGRRKSQ |
| UBP7_HUMAN | 7 | MNHQQQQQQQKAGEQQLSEPED | 119 | TGYVGLKNQGATCYMNSLLQ |
| Ubiquitin | | MEMEAGDTDDPPRITQNPVING | | TLFFTNQLRKAVYMMPTEGD |
| carboxyl- | | NVALSDGHNTAEEDMEDDTSWR | | DSSKSVPLALQRVFYELQHS |
| terminal | | SEATFQFTVERFSRLSESVLSP | | DKPVGTKKLTKSFGWETLDS |
| hydrolase 7 | | PCFVRNLPWKIMVMPRFYPDRP | | FMQHDVQELCRVLLDNVENK |
| | | HQKSVGFFLQCNAESDSTSWSC | | MKGTCVEGTIPKLFRGKMVS |
| | | HAQAVLKIINYRDDEKSFSRRI | | YIQCKEVDYRSDRREDYYDI |
| | | SHLFFHKENDWGESNEMAWSEV | | QLSIKGKKNIFESFVDYVAV |
| | | TDPEKGFIDDDKVTFEVFVQAD | | EQLDGDNKYDAGEHGLQEAE |
| | | APHGVAWDSKKHTGYVGLKNQG | | KGVKFLTLPPVLHLQLMREM |
| | | ATCYMNSLLQTLFFTNQLRKAV | | YDPQTDQNIKINDRFEFPEQ |
| | | YMMPTEGDDSSKSVPLALQRVE | | LPLDEFLQKTDPKDPANYIL |
| | | YELQHSDKPVGTKKLTKSEGWE | | HAVLVHSGDNHGGHYVVYLN |
| | | TLDSFMQHDVQELCRVLLDNVE | | PKGDGKWCKFDDDVVSRCTK |
| | | NKMKGTCVEGTIPKLFRGKMVS | | EEAIEHNYGGHDDDLSVRHC |
| | | YIQCKEVDYRSDRREDYYDIQL | | TNAYMLVYIRE |
| | | SIKGKKNIFESFVDYVAVEQLD | | |
| | | GDNKYDAGEHGLQEAEKGVKFL | | |
| | | TLPPVLHLQLMREMYDPQTDQN | | |
| | | IKINDRFEFPEQLPLDEFLQKT | | |
| | | DPKDPANYILHAVLVHSGDNHG | | |
| | | GHYVVYLNPKGDGKWCKFDDDV | | |
| | | VSRCTKEEAIEHNYGGHDDDLS | | |
| | | VRHCTNAYMLVYIRESKLSEVL | | |
| | | QAVTDHDIPQQLVERLQEEKRI | | |
| | | EAQKRKERQEAHLYMQVQIVAE | | |
| | | DQFCGHQGNDMYDEEKVKYTVE | | |
| | | KVLKNSSLAEFVQSLSQTMGFP | | |
| | | QDQIRLWPMQARSNGTKRPAML | | |
| | | DNEADGNKTMIELSDNENPWTI | | |
| | | FLETVDPELAASGATLPKEDKD | | |
| | | HDVMLFLKMYDPKTRSLNYCGH | | |
| | | IYTPISCKIRDLLPVMCDRAGF | | |
| | | IQDTSLILYEEVKPNLTERIQD | | |
| | | YDVSLDKALDELMDGDIIVFQK | | |
| | | DDPENDNSELPTAKEYFRDLYH | | |
| | | RVDVIFCDKTIPNDPGFVVTLS | | |
| | | NRMNYFQVAKTVAQRLNTDPML | | |
| | | LQFFKSQGYRDGPGNPLRHNYE | | |
| | | GTLRDLLQFFKPRQPKKLYYQQ | | |
| | | LKMKITDFENRRSFKCIWLNSQ | | |
| | | FREEEITLYPDKHGCVRDLLEE | | |
| | | CKKAVELGEKASGKLRLLEIVS | | |
| | | YKIIGVHQEDELLECLSPATSR | | |
| | | TFRIEEIPLDQVDIDKENEMLV | | |
| | | TVAHFHKEVEGTEGIPFLLRIH | | |
| | | QGEHFREVMKRIQSLLDIQEKE | | |
| | | FEKFKFAIVMMGRHQYINEDEY | | |
| | | EVNLKDFEPQPGNMSHPRPWLG | | |
| | | LDHENKAPKRSRYTYLEKAIKI | | |
| | | HN | | |
| U17L5_HUMAN | 8 | MEDDSLYLRGEWQFNHESKLTS | 120 | AVGAGLQNMGNTCYVNASLQ |
| Ubiquitin | | SRPDAAFAEIQRTSLPEKSPLS | | CLTYTPPLANYMLSREHSQT |
| carboxyl- | | CETRVDLCDDLAPVARQLAPRE | | CHRHKGCMLCTMQAHITRAL |
| terminal | | KLPLSSRRPAAVGAGLQNMGNT | | HNPGHVIQPSQALAAGFHRG |
| hydrolase 17- | | CYVNASLQCLTYTPPLANYMLS | | KQEDAHEFLMFTVDAMKKAC |
| like protein 5 | | REHSQTCHRHKGCMLCTMQAHI | | LPGHKQVDHHSKDTTLIHQI |
| | | TRALHNPGHVIQPSQALAAGFH | | FGGYWRSQIKCLHCHGISDT |
| | | RGKQEDAHEFLMFTVDAMKKAC | | FDPYLDIALDIQAAQSVQQA |
| | | LPGHKQVDHHSKDTTLIHQIFG | | LEQLAKPEELNGENAYHCGV |
| | | GYWRSQIKCLHCHGISDTEDPY | | CLQRAPASKTLTLHTSAKVL |
| | | LDIALDIQAAQSVQQALEQLAK | | ILVLKRFSDVTGNKIAKNVQ |
| | | PEELNGENAYHCGVCLQRAPAS | | YPECLDMQPYMSQPNTGPLV |
| | | KTLTLHTSAKVLILVLKRFSDV | | YVLYAVLVHAGWSCHNGHYF |
| | | TGNKIAKNVQYPECLDMQPYMS | | SYVKAQEGQWYKMDDAEVTA |
| | | QPNTGPLVYVLYAVLVHAGWSC | | SSITSVLSQQAYVLFYIQKS |
| | | HNGHYFSYVKAQEGQWYKMDDA | | EWERHSESVSRGREPRALGA |
| | | EVTASSITSVLSQQAYVLFYIQ | | EDTDRRATQGELKRDHPCLQ |
| | | KSEWERHSESVSRGREPRALGA | | APEL |
| | | EDTDRRATQGELKRDHPCLQAP | | |
| | | ELDEHLVERATQESTLDHWKEL | | |
| | | QEQNKTKPEFNVRKVEGTLPPD | | |
| | | VLVIHQSKYKCGMKNHHPEQQS | | |
| | | SLLNLSSSTPTHQESMNTGTLA | | |
| | | SLRGRARRSKGKNKHSKRALLV | | |
| | | CQ | | |
| U17LL_HUMAN | 9 | MEEDSLYLGGEWQFNHESKLTS | 121 | AVGAGLQNMGNTCYVNASLQ |
| Ubiquitin | | SRPDAAFAEIQRTSLPEKSPLS | | CLTYTPPLANYMLSREHSQT |
| carboxyl- | | CETRVDLCDDLAPVARQLAPRE | | CHRHKGCMLCTMQAHITRAL |
| terminal | | KLPLSNRRPAAVGAGLQNMGNT | | HNPGHVIQPSQALAAGFHRG |
| hydrolase 17- | | CYVNASLQCLTYTPPLANYMLS | | KQEDAHEFLMFTVDAMKKAC |
| like protein 21 | | REHSQTCHRHKGCMLCTMQAHI | | LPGHKQVDHHSKDTTLIHQI |
| | | TRALHNPGHVIQPSQALAAGFH | | FGGYWRSQIKCLHCHGISDT |
| | | RGKQEDAHEFLMFTVDAMKKAC | | FDPYLDIALDIQAAQSVQQA |
| | | LPGHKQVDHHSKDTTLIHQIFG | | LEQLVKPEELNGENAYHCGV |
| | | GYWRSQIKCLHCHGISDTEDPY | | CLQRAPASKMLTLLTSAKVL |
| | | LDIALDIQAAQSVQQALEQLVK | | ILVLKRFSDVTGNKIAKNVQ |
| | | PEELNGENAYHCGVCLQRAPAS | | YPECLDMQPYMSQPNTGPLV |
| | | KMLTLLTSAKVLILVLKRESDV | | YVLYAVLVHAGWSCHNGHYF |
| | | TGNKIAKNVQYPECLDMQPYMS | | SYVKAQEGQWYKMDDAEVTA |
| | | QPNTGPLVYVLYAVLVHAGWSC | | SSITSVLSQQAYVLFYIQKS |
| | | HNGHYFSYVKAQEGQWYKMDDA | | EWERHSESVSRGREPRALGA |
| | | EVTASSITSVLSQQAYVLFYIQ | | EDTDRRATQGELKRDHPCLQ |
| | | KSEWERHSESVSRGREPRALGA | | APEL |
| | | EDTDRRATQGELKRDHPCLQAP | | |
| | | ELDEHLVERATQESTLDHWKEL | | |
| | | QEQNKTKPEFNVRKVEGTLPPD | | |
| | | VLVIHQSKYKCGMKNHHPEQQS | | |
| | | SLLNLSSSTPTHQESMNTGTLA | | |
| | | SLRGRARRSKGKNKHSKRALLV | | |
| | | CQ | | |
| U17LA_HUMAN | 10 | MEDDSLYLGGEWQFNHFSKLTS | 122 | AVGAGLQNMGNTCYVNASLQ |
| Ubiquitin | | SRPDAAFAEIQRTSLPEKSPLS | | CLTYKPPLANYMLFREHSQT |
| carboxyl- | | CETRVDLCDDLAPVARQLAPRE | | CHRHKGCMLCTMQAHITRAL |
| terminal | | KPPLSSRRPAAVGAGLQNMGNT | | HIPGHVIQPSQALAAGFHRG |
| hydrolase 17- | | CYVNASLQCLTYKPPLANYMLF | | KQEDAHEFLMFTVDAMRKAC |
| like protein 10 | | REHSQTCHRHKGCMLCTMQAHI | | LPGHKQVDRHSKDTTLIHQI |
| | | TRALHIPGHVIQPSQALAAGFH | | FGGYWRSQIKCLHCHGISDT |
| | | RGKQEDAHEFLMFTVDAMRKAC | | FDPYLDIALDIQAAQSVQQA |
| | | LPGHKQVDRHSKDTTLIHQIFG | | LEQLVKPEELNGENAYHCGV |
| | | GYWRSQIKCLHCHGISDTFDPY | | CLQRAPASKTLTLHNSAKVL |
| | | LDIALDIQAAQSVQQALEQLVK | | ILVLKRFPDVTGNKIAKNVQ |
| | | PEELNGENAYHCGVCLQRAPAS | | YPECLDMQPYMSQQNTGPLV |
| | | KTLTLHNSAKVLILVLKRFPDV | | YVLYAVLVHAGWSCHNGHYS |
| | | TGNKIAKNVQYPECLDMQPYMS | | SYVKAQEGQWYKMDDAEVTA |
| | | QQNTGPLVYVLYAVLVHAGWSC | | SSITSVLSQQAYVLFYIQKS |
| | | HNGHYSSYVKAQEGQWYKMDDA | | EWERHSESVSRGREPRALGV |
| | | EVTASSITSVLSQQAYVLFYIQ | | EDTDRRATQGELKRDHPCLQ |
| | | KSEWERHSESVSRGREPRALGV | | APEL |
| | | EDTDRRATQGELKRDHPCLQAP | | |
| | | ELDEHLVERATQESTLDHWKEL | | |
| | | QEQNKTKPEFNVRRVEGTVPPD | | |
| | | VLVIHQSKYKCRMKNHHPEQQS | | |
| | | SLLNLSSTTPTDQESMNTGTLA | | |
| | | SLRGRTRRSKGKNKHSKRALLV | | |
| | | CQ | | |
| UBP41_HUMAN | 11 | MDGVLFRAHQCQYVHPCVHVYV | 123 | WGLVGLHNIGQTCCLNSLIQ |
| Putative | | TVGLMDPLCERKEKASKQEREN | | VFVMNVDFARILKRITVPRG |
| ubiquitin | | PLAHLAAWGLVGLHNIGQTCCL | | ADEQRRSVPFQMLLLLEKMQ |
| carboxyl- | | NSLIQVFVMNVDFARILKRITV | | DSRQKAVWPLELAYCLQKYN |
| terminal | | PRGADEQRRSVPFQMLLLLEKM | | VPLFVQHDAAQLYLKLWNLI |
| hydrolase 41 | | QDSRQKAVWPLELAYCLQKYNV | | KDQIADVHLVERLQALYMIR |
| | | PLFVQHDAAQLYLKLWNLIKDQ | | MKDSLICLDCAMESSRNSSM |
| | | IADVHLVERLQALYMIRMKDSL | | LTLRLSFFDVDSKPLKTLED |
| | | ICLDCAMESSRNSSMLTLRLSF | | ALHCFFQPRELSSKSKCFCE |
| | | FDVDSKPLKTLEDALHCFFQPR | | NCGKKTRGKQVLKLTHLPQT |
| | | ELSSKSKCFCENCGKKTRGKQV | | LTIHLMRESIRNSQTRKICH |
| | | LKLTHLPQTLTIHLMRESIRNS | | SLYFPQSLDESQILPMKRES |
| | | QTRKICHSLYFPQSLDESQILP | | CDAEEQSGGQYELFAVIAHV |
| | | MKRESCDAEEQSGGQYELFAVI | | GMADSGHYCVYIRNAVDGKW |
| | | AHVGMADSGHYCVYIRNAVDGK | | FCENDSNICLVSWEDIQCTY |
| | | WFCENDSNICLVSWEDIQCTYG | | GNPNYHW |
| | | NPNYHW | | |
| UBP38_HUMAN | 12 | MDKILEGLVSSSHPLPLKRVIV | 124 | SETGKTGLINLGNTCYMNSV |
| Ubiquitin | | RKVVESAEHWLDEAQCEAMEDL | | IQALFMATDERRQVLSLNLN |
| carboxyl- | | TTRLILEGQDPFQRQVGHQVLE | | GCNSLMKKLQHLFAFLAHTQ |
| terminal | | AYARYHRPEFESFENKTFVLGL | | REAYAPRIFFEASRPPWFTP |
| hydrolase 38 | | LHQGYHSLDRKDVAILDYIHNG | | RSQQDCSEYLRELLDRLHEE |
| | | LKLIMSCPSVLDLFSLLQVEVL | | EKILKVQASHKPSEILECSE |
| | | RMVCERPEPQLCARLSDLLTDF | | TSLQEVASKAAVLTETPRTS |
| | | VQCIPKGKLSITFCQQLVRTIG | | DGEKTLIEKMFGGKLRTHIR |
| | | HFQCVSTQERELREYVSQVTKV | | CLNCRSTSQKVEAFTDLSLA |
| | | SNLLQNIWKAEPATLLPSLQEV | | FCPSSSLENMSVQDPASSPS |
| | | FASISSTDASFEPSVALASLVQ | | IQDGGLMQASVPGPSEEPVV |
| | | HIPLQMITVLIRSLTTDPNVKD | | YNPTTAAFICDSLVNEKTIG |
| | | ASMTQALCRMIDWLSWPLAQHV | | SPPNEFYCSENTSVPNESNK |
| | | DTWVIALLKGLAAVQKFTILID | | ILVNKDVPQKPGGETTPSVT |
| | | VTLLKIELVENRLWFPLVRPGA | | DLLNYFLAPEILTGDNQYYC |
| | | LAVLSHMLLSFQHSPEAFHLIV | | ENCASLQNAEKTMQITEEPE |
| | | PHVVNLVHSFKNDGLPSSTAFL | | YLILTLLRFSYDQKYHVRRK |
| | | VQLTELIHCMMYHYSGFPDLYE | | ILDNVSLPLVLELPVKRITS |
| | | PILEAIKDFPKPSEEKIKLILN | | FSSLSESWSVDVDFTDLSEN |
| | | QSAWTSQSNSLASCLSRLSGKS | | LAKKLKPSGTDEASCTKLVP |
| | | ETGKTGLINLGNTCYMNSVIQA | | YLLSSVVVHSGISSESGHYY |
| | | LEMATDERRQVLSLNLNGCNSL | | SYARNITSTDSSYQMYHQSE |
| | | MKKLQHLFAFLAHTQREAYAPR | | ALALASSQSHLLGRDSPSAV |
| | | IFFEASRPPWFTPRSQQDCSEY | | FEQDLENKEMSKEWFLENDS |
| | | LRFLLDRLHEEEKILKVQASHK | | RVTFTSFQSVQKITSREPKD |
| | | PSEILECSETSLQEVASKAAVL | | TAYVLLYKKQH |
| | | TETPRTSDGEKTLIEKMEGGKL | | |
| | | RTHIRCLNCRSTSQKVEAFTDL | | |
| | | SLAFCPSSSLENMSVQDPASSP | | |
| | | SIQDGGLMQASVPGPSEEPVVY | | |
| | | NPTTAAFICDSLVNEKTIGSPP | | |
| | | NEFYCSENTSVPNESNKILVNK | | |
| | | DVPQKPGGETTPSVTDLLNYEL | | |
| | | APEILTGDNQYYCENCASLQNA | | |
| | | EKTMQITEEPEYLILTLLRESY | | |
| | | DQKYHVRRKILDNVSLPLVLEL | | |
| | | PVKRITSFSSLSESWSVDVDET | | |
| | | DLSENLAKKLKPSGTDEASCTK | | |
| | | LVPYLLSSVVVHSGISSESGHY | | |
| | | YSYARNITSTDSSYQMYHQSEA | | |
| | | LALASSQSHLLGRDSPSAVFEQ | | |
| | | DLENKEMSKEWFLENDSRVTFT | | |
| | | SFQSVQKITSRFPKDTAYVLLY | | |
| | | KKQHSTNGLSGNNPTSGLWING | | |
| | | DPPLQKELMDAITKDNKLYLQE | | |
| | | QELNARARALQAASASCSERPN | | |
| | | GFDDNDPPGSCGPTGGGGGGGF | | |
| | | NTVGRLVF | | |
| UBP43_HUMAN | 13 | MDLGPGDAAGGGPLAPRPRRRR | 125 | RPPGAQGLKNHGNTCFMNAV |
| Ubiquitin | | SLRRLESRELLALGSRSRPGDS | | VQCLSNTDLLAEFLALGRYR |
| carboxyl- | | PPRPQPGHCDGDGEGGFACAPG | | AAPGRAEVTEQLAALVRALW |
| terminal | | PVPAAPGSPGEERPPGPQPQLQ | | TREYTPQLSAEFKNAVSKYG |
| hydrolase 43 | | LPAGDGARPPGAQGLKNHGNTC | | SQFQGNSQHDALEFLLWLLD |
| | | FMNAVVQCLSNTDLLAEFLALG | | RVHEDLEGSSRGPVSEKLPP |
| | | RYRAAPGRAEVTEQLAALVRAL | | EATKTSENCLSPSAQLPLGQ |
| | | WTREYTPQLSAEFKNAVSKYGS | | SFVQSHFQAQYRSSLTCPHC |
| | | QFQGNSQHDALEFLLWLLDRVH | | LKQSNTFDPFLCVSLPIPLR |
| | | EDLEGSSRGPVSEKLPPEATKT | | QTRFLSVTLVFPSKSQRELR |
| | | SENCLSPSAQLPLGQSFVQSHF | | VGLAVPILSTVAALRKMVAE |
| | | QAQYRSSLTCPHCLKQSNTEDP | | EGGVPADEVILVELYPSGFQ |
| | | FLCVSLPIPLRQTRFLSVTLVE | | RSFFDEEDLNTIAEGDNVYA |
| | | PSKSQRFLRVGLAVPILSTVAA | | FQVPPSPSQGTLSAHPLGLS |
| | | LRKMVAEEGGVPADEVILVELY | | ASPRLAAREGQRFSLSLHSE |
| | | PSGFQRSFFDEEDLNTIAEGDN | | SKVLILFCNLVGSGQQASRF |
| | | VYAFQVPPSPSQGTLSAHPLGL | | GPPFLIREDRAVSWAQLQQS |
| | | SASPRLAAREGQRFSLSLHSES | | ILSKVRHLMKSEAPVQNLGS |
| | | KVLILFCNLVGSGQQASRFGPP | | LFSIRVVGLSVACSYLSPKD |
| | | FLIREDRAVSWAQLQQSILSKV | | SRPLCHWAVDRVLHLRRPGG |
| | | RHLMKSEAPVQNLGSLESIRVV | | PPHVKLAVEWDSSVKERLFG |
| | | GLSVACSYLSPKDSRPLCHWAV | | SLQEERAQDADSVWQQQQAH |
| | | DRVLHLRRPGGPPHVKLAVEWD | | QQHSCTLDECFQFYTKEEQL |
| | | SSVKERLFGSLQEERAQDADSV | | AQDDAWKCPHCQVLQQGMVK |
| | | WQQQQAHQQHSCTLDECFQFYT | | LSLWTLPDILIIHLKRFCQV |
| | | KEEQLAQDDAWKCPHCQVLQQG | | GERRNKLSTLVKFPLSGLNM |
| | | MVKLSLWTLPDILIIHLKRFCQ | | APHVAQRSTSPEAGLGPWPS |
| | | VGERRNKLSTLVKFPLSGLNMA | | WKQPDCLPTSYPLDFLYDLY |
| | | PHVAQRSTSPEAGLGPWPSWKQ | | AVCNHHGNLQGGHYTAYCRN |
| | | PDCLPTSYPLDFLYDLYAVCNH | | SLDGQWYSYDDSTVEPLRED |
| | | HGNLQGGHYTAYCRNSLDGQWY | | EVNTRGAYILFYQKRN |
| | | SYDDSTVEPLREDEVNTRGAYI | | |
| | | LFYQKRNSIPPWSASSSMRGST | | |
| | | SSSLSDHWLLRLGSHAGSTRGS | | |
| | | LLSWSSAPCPSLPQVPDSPIFT | | |
| | | NSLCNQEKGGLEPRRLVRGVKG | | |
| | | RSISMKAPTTSRAKQGPFKTMP | | |
| | | LRWSFGSKEKPPGASVELVEYL | | |
| | | ESRRRPRSTSQSIVSLLTGTAG | | |
| | | EDEKSASPRSNVALPANSEDGG | | |
| | | RAIERGPAGVPCPSAQPNHCLA | | |
| | | PGNSDGPNTARKLKENAGQDIK | | |
| | | LPRKFDLPLTVMPSVEHEKPAR | | |
| | | PEGQKAMNWKESFQMGSKSSPP | | |
| | | SPYMGFSGNSKDSRRGTSELDR | | |
| | | PLQGTLTLLRSVERKKENRRNE | | |
| | | RAEVSPQVPPVSLVSGGLSPAM | | |
| | | DGQAPGSPPALRIPEGLARGLG | | |
| | | SRLERDVWSAPSSLRLPRKASR | | |
| | | APRGSALGMSQRTVPGEQASYG | | |
| | | TFQRVKYHTLSLGRKKTLPESS | | |
| | | F | | |
| UBP2_HUMAN | 14 | MSQLSSTLKRYTESARYTDAHY | 126 | SAQGLAGLRNLGNTCEMNSI |
| Ubiquitin | | AKSGYGAYTPSSYGANLAASLL | | LQCLSNTRELRDYCLQRLYM |
| carboxyl- | | EKEKLGFKPVPTSSFLTRPRTY | | RDLHHGSNAHTALVEEFAKL |
| terminal | | GPSSLLDYDRGRPLLRPDITGG | | IQTIWTSSPNDVVSPSEFKT |
| hydrolase 2 | | GKRAESQTRGTERPLGSGLSGG | | QIQRYAPRFVGYNQQDAQEF |
| | | SGFPYGVTNNCLSYLPINAYDQ | | LRFLLDGLHNEVNRVTLRPK |
| | | GVTLTQKLDSQSDLARDESSLR | | SNPENLDHLPDDEKGRQMWR |
| | | TSDSYRIDPRNLGRSPMLARTR | | KYLEREDSRIGDLFVGQLKS |
| | | KELCTLQGLYQTASCPEYLVDY | | SLTCTDCGYCSTVEDPEWDL |
| | | LENYGRKGSASQVPSQAPPSRV | | SLPIAKRGYPEVTLMDCMRL |
| | | PEIISPTYRPIGRYTLWETGKG | | FTKEDVLDGDEKPTCCRCRG |
| | | QAPGPSRSSSPGRDGMNSKSAQ | | RKRCIKKFSIQRFPKILVLH |
| | | GLAGLRNLGNTCEMNSILQCLS | | LKRFSESRIRTSKLTTFVNF |
| | | NTRELRDYCLQRLYMRDLHHGS | | PLRDLDLREFASENTNHAVY |
| | | NAHTALVEEFAKLIQTIWTSSP | | NLYAVSNHSGTTMGGHYTAY |
| | | NDVVSPSEFKTQIQRYAPRFVG | | CRSPGTGEWHTENDSSVTPM |
| | | YNQQDAQEFLRFLLDGLHNEVN | | SSSQVRTSDAYLLFYELAS |
| | | RVTLRPKSNPENLDHLPDDEKG | | |
| | | RQMWRKYLEREDSRIGDLFVGQ | | |
| | | LKSSLTCTDCGYCSTVEDPFWD | | |
| | | LSLPIAKRGYPEVTLMDCMRLF | | |
| | | TKEDVLDGDEKPTCCRCRGRKR | | |
| | | CIKKFSIQRFPKILVLHLKRES | | |
| | | ESRIRTSKLTTFVNFPLRDLDL | | |
| | | REFASENTNHAVYNLYAVSNHS | | |
| | | GTTMGGHYTAYCRSPGTGEWHT | | |
| | | FNDSSVTPMSSSQVRTSDAYLL | | |
| | | FYELASPPSRM | | |
| UBP45_HUMAN | 15 | MRVKDPTKALPEKAKRSKRPTV | 127 | LSVRGITNLGNTCFFNAVMQ |
| Ubiquitin | | PHDEDSSDDIAVGLTCQHVSHA | | NLAQTYTLTDLMNEIKESST |
| carboxyl- | | ISVNHVKRAIAENLWSVCSECL | | KLKIFPSSDSQLDPLVVELS |
| terminal | | KERRFYDGQLVLTSDIWLCLKC | | RPGPLTSALFLFLHSMKETE |
| hydrolase 45 | | GFQGCGKNSESQHSLKHFKSSR | | KGPLSPKVLFNQLCQKAPRE |
| | | TEPHCIIINLSTWIIWCYECDE | | KDFQQQDSQELLHYLLDAVR |
| | | KLSTHCNKKVLAQIVDFLQKHA | | TEETKRIQASILKAFNNPTT |
| | | SKTQTSAFSRIMKLCEEKCETD | | KTADDETRKKVKAYGKEGVK |
| | | EIQKGGKCRNLSVRGITNLGNT | | MNFIDRIFIGELTSTVMCEE |
| | | CFFNAVMQNLAQTYTLTDLMNE | | CANISTVKDPFIDISLPIIE |
| | | IKESSTKLKIFPSSDSQLDPLV | | ERVSKPLLWGRMNKYRSLRE |
| | | VELSRPGPLTSALFLFLHSMKE | | TDHDRYSGNVTIENIHQPRA |
| | | TEKGPLSPKVLENQLCQKAPRF | | AKKHSSSKDKSQLIHDRKCI |
| | | KDFQQQDSQELLHYLLDAVRTE | | RKLSSGETVTYQKNENLEMN |
| | | ETKRIQASILKAFNNPTTKTAD | | GDSLMFASLMNSESRLNESP |
| | | DETRKKVKAYGKEGVKMNFIDR | | TDDSEKEASHSESNVDADSE |
| | | IFIGELTSTVMCEECANISTVK | | PSESESASKQTGLFRSSSGS |
| | | DPFIDISLPIIEERVSKPLLWG | | GVQPDGPLYPLSAGKLLYTK |
| | | RMNKYRSLRETDHDRYSGNVTI | | ETDSGDKEMAEAISELRLSS |
| | | ENIHQPRAAKKHSSSKDKSQLI | | TVTGDQDEDRENQPLNISNN |
| | | HDRKCIRKLSSGETVTYQKNEN | | LCFLEGKHLRSYSPQNAFQT |
| | | LEMNGDSLMFASLMNSESRLNE | | LSQSYITTSKECSIQSCLYQ |
| | | SPTDDSEKEASHSESNVDADSE | | FTSMELLMGNNKLLCENCTK |
| | | PSESESASKQTGLFRSSSGSGV | | NKQKYQEETSFAEKKVEGVY |
| | | QPDGPLYPLSAGKLLYTKETDS | | TNARKQLLISAVPAVLILHL |
| | | GDKEMAEAISELRLSSTVTGDQ | | KRFHQAGLSLRKVNRHVDEP |
| | | DFDRENQPLNISNNLCFLEGKH | | LMLDLAPFCSATCKNASVGD |
| | | LRSYSPQNAFQTLSQSYITTSK | | KVLYGLYGIVEHSGSMREGH |
| | | ECSIQSCLYQFTSMELLMGNNK | | YTAYVKVRTPSRKLSEHNTK |
| | | LLCENCTKNKQKYQEETSFAEK | | KKNVPGLKAADNESAGQWVH |
| | | KVEGVYTNARKQLLISAVPAVL | | VSDTYLQVVPESRALSAQAY |
| | | ILHLKRFHQAGLSLRKVNRHVD | | LLFYERVL |
| | | FPLMLDLAPFCSATCKNASVGD | | |
| | | KVLYGLYGIVEHSGSMREGHYT | | |
| | | AYVKVRTPSRKLSEHNTKKKNV | | |
| | | PGLKAADNESAGQWVHVSDTYL | | |
| | | QVVPESRALSAQAYLLFYERVL | | |
| UBP32_HUMAN | 16 | MGAKESRIGELSYEEALRRVTD | 128 | TEKGATGLSNLGNTCEMNSS |
| Ubiquitin | | VELKRLKDAFKRTCGLSYYMGQ | | IQCVSNTQPLTQYFISGRHL |
| carboxyl- | | HCFIREVLGDGVPPKVAEVIYC | | YELNRTNPIGMKGHMAKCYG |
| terminal | | SFGGTSKGLHENNLIVGLVLLT | | DLVQELWSGTQKNVAPLKLR |
| hydrolase 32 | | RGKDEEKAKYIFSLESSESGNY | | WTIAKYAPRENGFQQQDSQE |
| | | VIREEMERMLHVVDGKVPDTLR | | LLAFLLDGLHEDLNRVHEKP |
| | | KCFSEGEKVNYEKERNWLELNK | | YVELKDSDGRPDWEVAAEAW |
| | | DAFTFSRWLLSGGVYVTLTDDS | | DNHLRRNRSIVVDLFHGQLR |
| | | DTPTFYQTLAGVTHLEESDIID | | SQVKCKTCGHISVREDPENE |
| | | LEKRYWLLKAQSRTGREDLETF | | LSLPLPMDSYMHLEITVIKL |
| | | GPLVSPPIRPSLSEGLENAFDE | | DGTTPVRYGLRLNMDEKYTG |
| | | NRDNHIDFKEISCGLSACCRGP | | LKKQLSDLCGLNSEQILLAE |
| | | LAERQKFCFKVEDVDRDGVLSR | | VHGSNIKNFPQDNQKVRLSV |
| | | VELRDMVVALLEVWKDNRTDDI | | SGFLCAFEIPVPVSPISASS |
| | | PELHMDLSDIVEGILNAHDTTK | | PTQTDFSSSPSTNEMFTLTT |
| | | MGHLTLEDYQIWSVKNVLANEF | | NGDLPRPIFIPNGMPNTVVP |
| | | LNLLFQVCHIVLGLRPATPEEE | | CGTEKNFTNGMVNGHMPSLP |
| | | GQIIRGWLERESRYGLQAGHNW | | DSPFTGYIIAVHRKMMRTEL |
| | | FIISMQWWQQWKEYVKYDANPV | | YFLSSQKNRPSLFGMPLIVP |
| | | VIEPSSVLNGGKYSFGTAAHPM | | CTVHTRKKDLYDAVWIQVSR |
| | | EQVEDRIGSSLSYVNTTEEKES | | LASPLPPQEASNHAQDCDDS |
| | | DNISTASEASETAGSGELYSAT | | MGYQYPFTLRVVQKDGNSCA |
| | | PGADVCFARQHNTSDNNNQCLL | | WCPWYRFCRGCKIDCGEDRA |
| | | GANGNILLHLNPQKPGAIDNQP | | FIGNAYIAVDWDPTALHLRY |
| | | LVTQEPVKATSLTLEGGRLKRT | | QTSQERVVDEHESVEQSRRA |
| | | PQLIHGRDYEMVPEPVWRALYH | | QAEPINLDSCLRAFTSEEEL |
| | | WYGANLALPRPVIKNSKTDIPE | | GENEMYYCSKCKTHCLATKK |
| | | LELFPRYLLFLRQQPATRTQQS | | LDLWRLPPILIIHLKRFQFV |
| | | NIWVNMGNVPSPNAPLKRVLAY | | NGRWIKSQKIVKFPRESFDP |
| | | TGCFSRMQTIKEIHEYLSQRLR | | SAFLVPRDPALCQHKPLTPQ |
| | | IKEEDMRLWLYNSENYLTLLDD | | GDELSEPRILAREVKKVDAQ |
| | | EDHKLEYLKIQDEQHLVIEVRN | | SSAGEEDVLLSKSPSSLSAN |
| | | KDMSWPEEMSFIANSSKIDRHK | | IISSPKGSPSSSRKSGTSCP |
| | | VPTEKGATGLSNLGNTCEMNSS | | SSKNSSPNSSPRTLGRSKGR |
| | | IQCVSNTQPLTQYFISGRHLYE | | LRLPQIGSKNKLSSSKENLD |
| | | LNRTNPIGMKGHMAKCYGDLVQ | | ASKENGAGQICELADALSRG |
| | | ELWSGTQKNVAPLKLRWTIAKY | | HVLGGSQPELVTPQDHEVAL |
| | | APRENGFQQQDSQELLAFLLDG | | ANGFLYEHEACGNGYSNGQL |
| | | LHEDLNRVHEKPYVELKDSDGR | | GNHSEEDSTDDQREDTRIKP |
| | | PDWEVAAEAWDNHLRRNRSIVV | | IYNLYAISCHSGILGGGHYV |
| | | DLFHGQLRSQVKCKTCGHISVR | | TYAKNPNCKWYCYNDSSCKE |
| | | FDPFNFLSLPLPMDSYMHLEIT | | LHPDEIDTDSAYILFYEQQG |
| | | VIKLDGTTPVRYGLRLNMDEKY | | IDYAQFLPKTDGKKMADTSS |
| | | TGLKKQLSDLCGLNSEQILLAE | | MDEDFESDYKKYCVLQ |
| | | VHGSNIKNFPQDNQKVRLSVSG | | |
| | | FLCAFEIPVPVSPISASSPTQT | | |
| | | DESSSPSTNEMFTLTTNGDLPR | | |
| | | PIFIPNGMPNTVVPCGTEKNFT | | |
| | | NGMVNGHMPSLPDSPFTGYIIA | | |
| | | VHRKMMRTELYFLSSQKNRPSL | | |
| | | FGMPLIVPCTVHTRKKDLYDAV | | |
| | | WIQVSRLASPLPPQEASNHAQD | | |
| | | CDDSMGYQYPFTLRVVQKDGNS | | |
| | | CAWCPWYRFCRGCKIDCGEDRA | | |
| | | FIGNAYIAVDWDPTALHLRYQT | | |
| | | SQERVVDEHESVEQSRRAQAEP | | |
| | | INLDSCLRAFTSEEELGENEMY | | |
| | | YCSKCKTHCLATKKLDLWRLPP | | |
| | | ILIIHLKRFQFVNGRWIKSQKI | | |
| | | VKFPRESEDPSAFLVPRDPALC | | |
| | | QHKPLTPQGDELSEPRILAREV | | |
| | | KKVDAQSSAGEEDVLLSKSPSS | | |
| | | LSANIISSPKGSPSSSRKSGTS | | |
| | | CPSSKNSSPNSSPRTLGRSKGR | | |
| | | LRLPQIGSKNKLSSSKENLDAS | | |
| | | KENGAGQICELADALSRGHVLG | | |
| | | GSQPELVTPQDHEVALANGFLY | | |
| | | EHEACGNGYSNGQLGNHSEEDS | | |
| | | TDDQREDTRIKPIYNLYAISCH | | |
| | | SGILGGGHYVTYAKNPNCKWYC | | |
| | | YNDSSCKELHPDEIDTDSAYIL | | |
| | | FYEQQGIDYAQFLPKTDGKKMA | | |
| | | DTSSMDEDFESDYKKYCVLQ | | |
| U17L6_HUMAN | 17 | MEDDSLYLRGEWQFNHFSKLTS | 129 | AVGAGLQNMGNTCYVNASLQ |
| Ubiquitin | | SRPDAAFAEIQRTSLPEKSPLS | | CLTYTPPLANYMLSREHSQT |
| carboxyl- | | CETRVDLCDDLAPVARQLAPRE | | CHRHKGCMLCTMQAHITRAL |
| terminal | | KLPLSSRRPAAVGAGLQNMGNT | | HNPGHVIQPSQALAAGFHRG |
| hydrolase 17- | | CYVNASLQCLTYTPPLANYMLS | | KQEDAHEFLMFTVDAMKKAC |
| like protein 6 | | REHSQTCHRHKGCMLCTMQAHI | | LPGHKQVDHHSKDTTLIHQI |
| | | TRALHNPGHVIQPSQALAAGEH | | FGGYWRSQIKCLHCHGISDT |
| | | RGKQEDAHEFLMFTVDAMKKAC | | FDPYLDIALDIQAAQSVQQA |
| | | LPGHKQVDHHSKDTTLIHQIFG | | LEQLVKPEELNGENAYHCGV |
| | | GYWRSQIKCLHCHGISDTEDPY | | CLQRAPASKTLTLHTSAKVL |
| | | LDIALDIQAAQSVQQALEQLVK | | ILVLKRFSDVTGNKIAKNVQ |
| | | PEELNGENAYHCGVCLQRAPAS | | YPECLDMQPYMSQQNTGPLV |
| | | KTLTLHTSAKVLILVLKRESDV | | YVLYAVLVHAGWSCHNGHYF |
| | | TGNKIAKNVQYPECLDMQPYMS | | SYVKAQEGQWYKMDDAEVTA |
| | | QQNTGPLVYVLYAVLVHAGWSC | | SSITSVLSQQAYVLFYIQKS |
| | | HNGHYFSYVKAQEGQWYKMDDA | | |
| | | EVTASSITSVLSQQAYVLFYIQ | | |
| | | KSEWERHSESVSRGREPRALGS | | |
| | | ED | | |
| UBP42_HUMAN | 18 | MTIVDKASESSDPSAYQNQPGS | 130 | RVGAGLQNLGNTCFANAALQ |
| Ubiquitin | | SEAVSPGDMDAGSASWGAVSSL | | CLTYTPPLANYMLSHEHSKT |
| carboxyl- | | NDVSNHTLSLGPVPGAVVYSSS | | CHAEGFCMMCTMQAHITQAL |
| terminal | | SVPDKSKPSPQKDQALGDGIAP | | SNPGDVIKPMEVINEMRRIA |
| hydrolase 42 | | PQKVLFPSEKICLKWQQTHRVG | | RHFREGNQEDAHEFLQYTVD |
| | | AGLQNLGNTCFANAALQCLTYT | | AMQKACLNGSNKLDRHTQAT |
| | | PPLANYMLSHEHSKTCHAEGFC | | TLVCQIFGGYLRSRVKCLNC |
| | | MMCTMQAHITQALSNPGDVIKP | | KGVSDTFDPYLDITLEIKAA |
| | | MFVINEMRRIARHFREGNQEDA | | QSVNKALEQFVKPEQLDGEN |
| | | HEFLQYTVDAMQKACLNGSNKL | | SYKCSKCKKMVPASKRFTIH |
| | | DRHTQATTLVCQIFGGYLRSRV | | RSSNVLTLSLKRFANFTGGK |
| | | KCLNCKGVSDTFDPYLDITLEI | | IAKDVKYPEYLDIRPYMSQP |
| | | KAAQSVNKALEQFVKPEQLDGE | | NGEPIVYVLYAVLVHTGENC |
| | | NSYKCSKCKKMVPASKRFTIHR | | HAGHYFCYIKASNGLWYQMN |
| | | SSNVLTLSLKRFANFTGGKIAK | | DSIVSTSDIRSVLSQQAYVL |
| | | DVKYPEYLDIRPYMSQPNGEPI | | FYIRSHDVKNGGE |
| | | VYVLYAVLVHTGENCHAGHYFC | | |
| | | YIKASNGLWYQMNDSIVSTSDI | | |
| | | RSVLSQQAYVLFYIRSHDVKNG | | |
| | | GELTHPTHSPGQSSPRPVISQR | | |
| | | VVTNKQAAPGFIGPQLPSHMIK | | |
| | | NPPHLNGTGPLKDTPSSSMSSP | | |
| | | NGNSSVNRASPVNASASVQNWS | | |
| | | VNRSSVIPEHPKKQKITISIHN | | |
| | | KLPVRQCQSQPNLHSNSLENPT | | |
| | | KPVPSSTITNSAVQSTSNASTM | | |
| | | SVSSKVTKPIPRSESCSQPVMN | | |
| | | GKSKLNSSVLVPYGAESSEDSD | | |
| | | EESKGLGKENGIGTIVSSHSPG | | |
| | | QDAEDEEATPHELQEPMTLNGA | | |
| | | NSADSDSDPKENGLAPDGASCQ | | |
| | | GQPALHSENPFAKANGLPGKLM | | |
| | | PAPLLSLPEDKILETERLSNKL | | |
| | | KGSTDEMSAPGAERGPPEDRDA | | |
| | | EPQPGSPAAESLEEPDAAAGLS | | |
| | | STKKAPPPRDPGTPATKEGAWE | | |
| | | AMAVAPEEPPPSAGEDIVGDTA | | |
| | | PPDLCDPGSLTGDASPLSQDAK | | |
| | | GMIAEGPRDSALAEAPEGLSPA | | |
| | | PPARSEEPCEQPLLVHPSGDHA | | |
| | | RDAQDPSQSLGAPEAAERPPAP | | |
| | | VLDMAPAGHPEGDAEPSPGERV | | |
| | | EDAAAPKAPGPSPAKEKIGSLR | | |
| | | KVDRGHYRSRRERSSSGEPARE | | |
| | | SRSKTEGHRHRRRRTCPRERDR | | |
| | | QDRHAPEHHPGHGDRLSPGERR | | |
| | | SLGRCSHHHSRHRSGVELDWVR | | |
| | | HHYTEGERGWGREKFYPDRPRW | | |
| | | DRCRYYHDRYALYAARDWKPFH | | |
| | | GGREHERAGLHERPHKDHNRGR | | |
| | | RGCEPARERERHRPSSPRAGAP | | |
| | | HALAPHPDRESHDRTALVAGDN | | |
| | | CNLSDRFHEHENGKSRKRRHDS | | |
| | | VENSDSHVEKKARRSEQKDPLE | | |
| | | EPKAKKHKKSKKKKKSKDKHRD | | |
| | | RDSRHQQDSDLSAACSDADLHR | | |
| | | HKKKKKKKKRHSRKSEDFVKDS | | |
| | | ELHLPRVTSLETVAQFRRAQGG | | |
| | | FPLSGGPPLEGVGPFREKTKHL | | |
| | | RMESRDDRCRLFEYGQGKRRYL | | |
| | | ELGR | | |
| U17L7_HUMAN | 19 | MEDDSLYLGGDWQFNHFSKLTS | 131 | AVGAGLQKIGNTFYVNVSLQ |
| Inactive | | SRLDAAFAEIQRTSLSEKSPLS | | CLTYTLPLSNYMLSREDSQT |
| ubiquitin | | SETREDLCDDLAPVARQLAPRE | | CHLHKCCMFCTMQAHITWAL |
| carboxyl- | | KLPLSSRRPAAVGAGLQKIGNT | | HSPGHVIQPSQVLAAGFHRG |
| terminal | | FYVNVSLQCLTYTLPLSNYMLS | | EQEDAHEFLMFTVDAMKKAC |
| hydrolase 17- | | REDSQTCHLHKCCMFCTMQAHI | | LPGHKQLDHHSKDTTLIHQI |
| like protein 7 | | TWALHSPGHVIQPSQVLAAGFH | | FGAYWRSQIKYLHCHGVSDT |
| | | RGEQEDAHEFLMFTVDAMKKAC | | FDPYLDIALDIQAAQSVKQA |
| | | LPGHKQLDHHSKDTTLIHQIFG | | LEQLVKPKELNGENAYHCGL |
| | | AYWRSQIKYLHCHGVSDTEDPY | | CLQKAPASKTLTLPTSAKVL |
| | | LDIALDIQAAQSVKQALEQLVK | | ILVLKRFSDVTGNKLAKNVQ |
| | | PKELNGENAYHCGLCLQKAPAS | | YPKCRDMQPYMSQQNTGPLV |
| | | KTLTLPTSAKVLILVLKRFSDV | | YVLYAVLVHAGWSCHNGHYF |
| | | TGNKLAKNVQYPKCRDMQPYMS | | SYVKAQEGQWYKMDDAEVTA |
| | | QQNTGPLVYVLYAVLVHAGWSC | | SGITSVLSQQAYVLFYIQKS |
| | | HNGHYFSYVKAQEGQWYKMDDA | | EWERHSESVSRGREPRALGA |
| | | EVTASGITSVLSQQAYVLFYIQ | | EDTDRPATQGELKRDHPCLQ |
| | | KSEWERHSESVSRGREPRALGA | | VPEL |
| | | EDTDRPATQGELKRDHPCLQVP | | |
| | | ELDEHLVERATQESTLDHWKFP | | |
| | | QEQNKTKPEFNVRKVEGTLPPN | | |
| | | VLVIHQSKYKCGMKNHHPEQQS | | |
| | | SLLNLSSTKPTDQESMNTGTLA | | |
| | | SLQGSTRRSKGNNKHSKRSLLV | | |
| | | CQ | | |
| U17LH_HUMAN | 20 | MEDDSLYLGGEWQFNHESKLTS | 132 | AVGAGLQNMGNTCYVNASLQ |
| Ubiquitin | | SRPDAAFAEIQRTSLPEKSPLS | | CLTYTPPLANYMLSREHSQT |
| carboxyl- | | CETRVDLCDDLAPVARQLAPRE | | CHRHKGCMLCTMQAHITRAL |
| terminal | | KLPLSSRRPAAVGAGLQNMGNT | | HNPGHVIQPSQALAAGFHRG |
| hydrolase 17- | | CYVNASLQCLTYTPPLANYMLS | | KQEDAHEFLMFTVDAMKKAC |
| like protein 17 | | REHSQTCHRHKGCMLCTMQAHI | | LPGHKQVDHHSKDTTLIHQI |
| | | TRALHNPGHVIQPSQALAAGFH | | FGGYWRSQIKCLHCHGISDT |
| | | RGKQEDAHEFLMFTVDAMKKAC | | FDPYLDIALDIQAAQSVQQA |
| | | LPGHKQVDHHSKDTTLIHQIFG | | LEQLVKPEELNGENAYHCGV |
| | | GYWRSQIKCLHCHGISDTFDPY | | CLQRAPASKTLTLHTSAKVL |
| | | LDIALDIQAAQSVQQALEQLVK | | ILVLKRFSDVTGNKIAKNVQ |
| | | PEELNGENAYHCGVCLQRAPAS | | YPECLDMQPYMSQQNTGPLV |
| | | KTLTLHTSAKVLILVLKRFSDV | | YVLYAVLVHAGWSCHNGHYF |
| | | TGNKIAKNVQYPECLDMQPYMS | | SYVKAQEGQWYKMDDAEVTA |
| | | QQNTGPLVYVLYAVLVHAGWSC | | ASITSVLSQQAYVLFYIQKS |
| | | HNGHYFSYVKAQEGQWYKMDDA | | EWERHSESVSRGREPRALGA |
| | | EVTAASITSVLSQQAYVLFYIQ | | EDTDRRATQGELKRDHPCLQ |
| | | KSEWERHSESVSRGREPRALGA | | APEL |
| | | EDTDRRATQGELKRDHPCLQAP | | |
| | | ELDEHLVERATQESTLDHWKEL | | |
| | | QEQNKTKPEFNVRKVEGTLPPD | | |
| | | VLVIHQSKYKCGMKNHHPEQQS | | |
| | | SLLNLSSSTPTHQESMNTGTLA | | |
| | | SLRGRARRSKGKNKHSKRALLV | | |
| | | CQ | | |
| UBP13_HUMAN | 21 | MQRRGALFGMPGGSGGRKMAAG | 133 | YGPGYTGLKNLGNSCYLSSV |
| Ubiquitin | | DIGELLVPHMPTIRVPRSGDRV | | MQAIFSIPEFQRAYVGNLPR |
| carboxyl- | | YKNECAFSYDSPNSEGGLYVCM | | IFDYSPLDPTQDENTQMTKL |
| terminal | | NTFLAFGREHVERHERKTGQSV | | GHGLLSGQYSKPPVKSELIE |
| hydrolase 13 | | YMHLKRHVREKVRGASGGALPK | | QVMKEEHKPQQNGISPRMEK |
| | | RRNSKIFLDLDTDDDLNSDDYE | | AFVSKSHPEFSSNRQQDAQE |
| | | YEDEAKLVIFPDHYEIALPNIE | | FELHLVNLVERNRIGSENPS |
| | | ELPALVTIACDAVLSSKSPYRK | | DVFRELVEERIQCCQTRKVR |
| | | QDPDTWENELPVSKYANNLTQL | | YTERVDYLMQLPVAMEAATN |
| | | DNGVRIPPSGWKCARCDLRENL | | KDELIAYELTRREAEANRRP |
| | | WLNLTDGSVLCGKWFFDSSGGN | | LPELVRAKIPESACLQAFSE |
| | | GHALEHYRDMGYPLAVKLGTIT | | PENVDDFWSSALQAKSAGVK |
| | | PDGADVYSFQEEEPVLDPHLAK | | TSRFASFPEYLVVQIKKFTF |
| | | HLAHFGIDMLHMHGTENGLQDN | | GLDWVPKKFDVSIDMPDLLD |
| | | DIKLRVSEWEVIQESGTKLKPM | | INHLRARGLQPGEEELPDIS |
| | | YGPGYTGLKNLGNSCYLSSVMQ | | PPIVIPDDSKDRLMNQLIDP |
| | | AIFSIPEFQRAYVGNLPRIFDY | | SDIDESSVMQLAEMGFPLEA |
| | | SPLDPTQDENTQMTKLGHGLLS | | CRKAVYFTGNMGAEVAFNWI |
| | | GQYSKPPVKSELIEQVMKEEHK | | IVHMEEPDFAEPLTMPGYGG |
| | | PQQNGISPRMFKAFVSKSHPEF | | AASAGASVEGASGLDNQPPE |
| | | SSNRQQDAQEFFLHLVNLVERN | | EIVAIITSMGFQRNQAIQAL |
| | | RIGSENPSDVFRELVEERIQCC | | RATNNNLERALDWIFSHPEF |
| | | QTRKVRYTERVDYLMQLPVAME | | EEDSDEVIEMENNANANIIS |
| | | AATNKDELIAYELTRREAEANR | | EAKPEGPRVKDGSGTYELFA |
| | | RPLPELVRAKIPFSACLQAFSE | | FISHMGTSTMSGHYICHIKK |
| | | PENVDDFWSSALQAKSAGVKTS | | EGRWVIYNDHKVCASERPPK |
| | | RFASFPEYLVVQIKKFTFGLDW | | DLGYMYFYRRIPS |
| | | VPKKFDVSIDMPDLLDINHLRA | | |
| | | RGLQPGEEELPDISPPIVIPDD | | |
| | | SKDRLMNQLIDPSDIDESSVMQ | | |
| | | LAEMGFPLEACRKAVYFTGNMG | | |
| | | AEVAFNWIIVHMEEPDFAEPLT | | |
| | | MPGYGGAASAGASVEGASGLDN | | |
| | | QPPEEIVAIITSMGFQRNQAIQ | | |
| | | ALRATNNNLERALDWIFSHPEF | | |
| | | EEDSDEVIEMENNANANIISEA | | |
| | | KPEGPRVKDGSGTYELFAFISH | | |
| | | MGTSTMSGHYICHIKKEGRWVI | | |
| | | YNDHKVCASERPPKDLGYMYFY | | |
| | | RRIPS | | |
| UBP11_HUMAN | 22 | MAVAPRLFGGLCFRERDQNPEV | 134 | KGQPGICGLTNLGNTCEMNS |
| Ubiquitin | | AVEGRLPISHSCVGCRRERTAM | | ALQCLSNVPQLTEYFLNNCY |
| carboxyl- | | ATVAANPAAAAAAVAAAAAVTE | | LEELNERNPLGMKGEIAEAY |
| terminal | | DREPQHEELPGLDSQWRQIENG | | ADLVKQAWSGHHRSIVPHVE |
| hydrolase 11 | | ESGRERPLRAGESWELVEKHWY | | KNKVGHFASQFLGYQQHDSQ |
| | | KQWEAYVQGGDQDSSTFPGCIN | | ELLSFLLDGLHEDLNRVKKK |
| | | NATLFQDEINWRLKEGLVEGED | | EYVELCDAAGRPDQEVAQEA |
| | | YVLLPAAAWHYLVSWYGLEHGQ | | WQNHKRRNDSVIVDTFHGLF |
| | | PPIERKVIELPNIQKVEVYPVE | | KSTLVCPDCGNVSVTFDPFC |
| | | LLLVRHNDLGKSHTVQFSHTDS | | YLSVPLPISHKRVLEVFFIP |
| | | IGLVLRTARERELVEPQEDTRL | | MDPRRKPEQHRLVVPKKGKI |
| | | WAKNSEGSLDRLYDTHITVLDA | | SDLCVALSKHTGISPERMMV |
| | | ALETGQLIIMETRKKDGTWPSA | | ADVESHRFYKLYQLEEPLSS |
| | | QLHVMNNNMSEEDEDEKGQPGI | | ILDRDDIFVYEVSGRIEAIE |
| | | CGLTNLGNTCEMNSALQCLSNV | | GSREDIVVPVYLRERTPARD |
| | | PQLTEYFLNNCYLEELNERNPL | | YNNSYYGLMLFGHPLLVSVP |
| | | GMKGEIAEAYADLVKQAWSGHH | | RDRFTWEGLYNVLMYRLSRY |
| | | RSIVPHVFKNKVGHFASQFLGY | | VTKPNSDDEDDGDEKEDDEE |
| | | QQHDSQELLSELLDGLHEDLNR | | DKDDVPGPSTGGSLRDPEPE |
| | | VKKKEYVELCDAAGRPDQEVAQ | | QAGPSSGVTNRCPFLLDNCL |
| | | EAWQNHKRRNDSVIVDTFHGLF | | GTSQWPPRRRRKQLFTLQTV |
| | | KSTLVCPDCGNVSVTFDPFCYL | | NSNGTSDRTTSPEEVHAQPY |
| | | SVPLPISHKRVLEVFFIPMDPR | | IAIDWEPEMKKRYYDEVEAE |
| | | RKPEQHRLVVPKKGKISDLCVA | | GYVKHDCVGYVMKKAPVRLQ |
| | | LSKHTGISPERMMVADVESHRF | | ECIELFTTVETLEKENPWYC |
| | | YKLYQLEEPLSSILDRDDIFVY | | PSCKQHQLATKKLDLWMLPE |
| | | EVSGRIEAIEGSREDIVVPVYL | | ILIIHLKRFSYTKESREKLD |
| | | RERTPARDYNNSYYGLMLFGHP | | TLVEFPIRDLDESEFVIQPQ |
| | | LLVSVPRDRFTWEGLYNVLMYR | | NESNPELYKYDLIAVSNHYG |
| | | LSRYVTKPNSDDEDDGDEKEDD | | GMRDGHYTTFACNKDSGQWH |
| | | EEDKDDVPGPSTGGSLRDPEPE | | YFDDNSVSPVNENQIESKAA |
| | | QAGPSSGVTNRCPFLLDNCLGT | | YVLFYQRQD |
| | | SQWPPRRRRKQLFTLQTVNSNG | | |
| | | TSDRTTSPEEVHAQPYIAIDWE | | |
| | | PEMKKRYYDEVEAEGYVKHDCV | | |
| | | GYVMKKAPVRLQECIELFTTVE | | |
| | | TLEKENPWYCPSCKQHQLATKK | | |
| | | LDLWMLPEILIIHLKRFSYTKE | | |
| | | SREKLDTLVEFPIRDLDESEFV | | |
| | | IQPQNESNPELYKYDLIAVSNH | | |
| | | YGGMRDGHYTTFACNKDSGQWH | | |
| | | YFDDNSVSPVNENQIESKAAYV | | |
| | | LFYQRQDVARRLLSPAGSSGAP | | |
| | | ASPACSSPPSSEFMDVN | | |
| U17L1_HUMAN | 23 | MGDDSLYLGGEWQFNHESKLTS | 135 | AVGAGLQNMGNTCYENASLQ |
| Ubiquitin | | SRPDAAFAEIQRTSLPEKSPLS | | CLTYTLPLANYMLSREHSQT |
| carboxyl- | | SETRVDLCDDLAPVARQLAPRE | | CQRPKCCMLCTMQAHITWAL |
| terminal | | KLPLSSRRPAAVGAGLQNMGNT | | HSPGHVIQPSQALAAGFHRG |
| hydrolase 17- | | CYENASLQCLTYTLPLANYMLS | | KQEDVHEFLMFTVDAMKKAC |
| like protein 1 | | REHSQTCQRPKCCMLCTMQAHI | | LPGHKQVDHHCKDTTLIHQI |
| | | TWALHSPGHVIQPSQALAAGFH | | FGGCWRSQIKCLHCHGISDT |
| | | RGKQEDVHEFLMFTVDAMKKAC | | FDPYLDIALDIQAAQSVKQA |
| | | LPGHKQVDHHCKDTTLIHQIFG | | LEQLVKPEELNGENAYHCGL |
| | | GCWRSQIKCLHCHGISDTFDPY | | CLQRAPASNTLTLHTSAKVL |
| | | LDIALDIQAAQSVKQALEQLVK | | ILVLKRESDVAGNKLAKNVQ |
| | | PEELNGENAYHCGLCLQRAPAS | | YPECLDMQPYMSQQNTGPLV |
| | | NTLTLHTSAKVLILVLKRFSDV | | YVLYAVLVHAGWSCHDGHYF |
| | | AGNKLAKNVQYPECLDMQPYMS | | SYVKAQEVQWYKMDDAEVTV |
| | | QQNTGPLVYVLYAVLVHAGWSC | | CSIISVLSQQAYVLFYIQKS |
| | | HDGHYFSYVKAQEVQWYKMDDA | | |
| | | EVTVCSIISVLSQQAYVLFYIQ | | |
| | | KSEWERHSESVSRGREPRALGA | | |
| | | EDTDRRAKQGELKRDHPCLQAP | | |
| | | ELDEHLVERATQESTLDHWKEL | | |
| | | QEQNKTKPEFNVGKVEGTLPPN | | |
| | | ALVIHQSKYKCGMKNHHPEQQS | | |
| | | SLLNLSSTTRTDQESMNTGTLA | | |
| | | SLQGRTRRAKGKNKHSKRALLV | | |
| | | CQ | | |
| UBP14_HUMAN | 24 | MPLYSVTVKWGKEKFEGVELNT | 136 | ASAMELPCGLTNLGNTCYMN |
| Ubiquitin | | DEPPMVFKAQLFALTGVQPARQ | | ATVQCIRSVPELKDALKRYA |
| carboxyl- | | KVMVKGGTLKDDDWGNIKIKNG | | GALRASGEMASAQYITAALR |
| terminal | | MTLLMMGSADALPEEPSAKTVE | | DLFDSMDKTSSSIPPIILLQ |
| hydrolase 14 | | VEDMTEEQLASAMELPCGLTNL | | FLHMAFPQFAEKGEQGQYLQ |
| | | GNTCYMNATVQCIRSVPELKDA | | QDANECWIQMMRVLQQKLEA |
| | | LKRYAGALRASGEMASAQYITA | | IEDDSVKETDSSSASAATPS |
| | | ALRDLFDSMDKTSSSIPPIILL | | KKKSLIDQFFGVEFETTMKC |
| | | QFLHMAFPQFAEKGEQGQYLQQ | | TESEEEEVTKGKENQLQLSC |
| | | DANECWIQMMRVLQQKLEAIED | | FINQEVKYLFTGLKLRLQEE |
| | | DSVKETDSSSASAATPSKKKSL | | ITKQSPTLQRNALYIKSSKI |
| | | IDQFFGVEFETTMKCTESEEEE | | SRLPAYLTIQMVRFFYKEKE |
| | | VTKGKENQLQLSCFINQEVKYL | | SVNAKVLKDVKFPLMLDMYE |
| | | FTGLKLRLQEEITKQSPTLQRN | | LCTPELQEKMVSFRSKFKDL |
| | | ALYIKSSKISRLPAYLTIQMVR | | EDKKVNQQPNTSDKKSSPQK |
| | | FFYKEKESVNAKVLKDVKFPLM | | EVKYEPESFADDIGSNNCGY |
| | | LDMYELCTPELQEKMVSERSKE | | YDLQAVLTHQGRSSSSGHYV |
| | | KDLEDKKVNQQPNTSDKKSSPQ | | SWVKRKQDEWIKEDDDKVSI |
| | | KEVKYEPESFADDIGSNNCGYY | | VTPEDILRLSGGGDWHIAYV |
| | | DLQAVLTHQGRSSSSGHYVSWV | | LLYGPRR |
| | | KRKQDEWIKEDDDKVSIVTPED | | |
| | | ILRLSGGGDWHIAYVLLYGPRR | | |
| | | VEIMEEESEQ | | |
| Q13107\|UBP4_ | 25 | MAEGGGCRERPDAETQKSELGP | 137 | SHIQPGLCGLGNLGNTCEMN |
| HUMAN | | LMRTTLQRGAQWYLIDSRWEKQ | | SALQCLSNTAPLTDYELKDE |
| Ubiquitin | | WKKYVGFDSWDMYNVGEHNLEP | | YEAEINRDNPLGMKGEIAEA |
| carboxyl- | | GPIDNSGLESDPESQTLKEHLI | | YAELIKQMWSGRDAHVAPRM |
| terminal | | DELDYVLVPTEAWNKLLNWYGC | | FKTQVGRFAPQFSGYQQQDS |
| hydrolase 4 | | VEGQQPIVRKVVEHGLFVKHCK | | QELLAFLLDGLHEDLNRVKK |
| | | VEVYLLELKLCENSDPTNVLSC | | KPYLELKDANGRPDAVVAKE |
| | | HFSKADTIATIEKEMRKLENIP | | AWENHRLRNDSVIVDTFHGL |
| | | AERETRLWNKYMSNTYEQLSKL | | FKSTLVCPECAKVSVTFDPF |
| | | DNTVQDAGLYQGQVLVIEPQNE | | CYLTLPLPLKKDRVMEVELV |
| | | DGTWPRQTLQSKSSTAPSRNFT | | PADPHCRPTQYRVTVPLMGA |
| | | TSPKSSASPYSSVSASLIANGD | | VSDLCEALSRLSGIAAENMV |
| | | STSTCGMHSSGVSRGGSGESAS | | VADVYNHRFHKIFQMDEGLN |
| | | YNCQEPPSSHIQPGLCGLGNLG | | HIMPRDDIFVYEVCSTSVDG |
| | | NTCFMNSALQCLSNTAPLTDYF | | SECVTLPVYFRERKSRPSST |
| | | LKDEYEAEINRDNPLGMKGEIA | | SSASALYGQPLLLSVPKHKL |
| | | EAYAELIKQMWSGRDAHVAPRM | | TLESLYQAVCDRISRYVKQP |
| | | FKTQVGRFAPQFSGYQQQDSQE | | LPDEFGSSPLEPGACNGSRN |
| | | LLAFLLDGLHEDLNRVKKKPYL | | SCEGEDEEEMEHQEEGKEQL |
| | | ELKDANGRPDAVVAKEAWENHR | | SETEGSGEDEPGNDPSETTQ |
| | | LRNDSVIVDTFHGLFKSTLVCP | | KKIKGQPCPKRLFTFSLVNS |
| | | ECAKVSVTFDPFCYLTLPLPLK | | YGTADINSLAADGKLLKLNS |
| | | KDRVMEVFLVPADPHCRPTQYR | | RSTLAMDWDSETRRLYYDEQ |
| | | VTVPLMGAVSDLCEALSRLSGI | | ESEAYEKHVSMLQPQKKKKT |
| | | AAENMVVADVYNHRFHKIFQMD | | TVALRDCIELFTTMETLGEH |
| | | EGLNHIMPRDDIFVYEVCSTSV | | DPWYCPNCKKHQQATKKEDL |
| | | DGSECVTLPVYFRERKSRPSST | | WSLPKILVVHLKRFSYNRYW |
| | | SSASALYGQPLLLSVPKHKLTL | | RDKLDTVVEFPIRGLNMSEF |
| | | ESLYQAVCDRISRYVKQPLPDE | | VCNLSARPYVYDLIAVSNHY |
| | | FGSSPLEPGACNGSRNSCEGED | | GAMGVGHYTAYAKNKLNGKW |
| | | EEEMEHQEEGKEQLSETEGSGE | | YYFDDSNVSLASEDQIVTKA |
| | | DEPGNDPSETTQKKIKGQPCPK | | AYVLFYQRRD |
| | | RLFTFSLVNSYGTADINSLAAD | | |
| | | GKLLKLNSRSTLAMDWDSETRR | | |
| | | LYYDEQESEAYEKHVSMLQPQK | | |
| | | KKKTTVALRDCIELFTTMETLG | | |
| | | EHDPWYCPNCKKHQQATKKEDL | | |
| | | WSLPKILVVHLKRFSYNRYWRD | | |
| | | KLDTVVEFPIRGLNMSEFVCNL | | |
| | | SARPYVYDLIAVSNHYGAMGVG | | |
| | | HYTAYAKNKLNGKWYYFDDSNV | | |
| | | SLASEDQIVTKAAYVLFYQRRD | | |
| | | DEFYKTPSLSSSGSSDGGTRPS | | |
| | | SSQQGFGDDEACSMDTN | | |
| UBP26_HUMAN | 26 | MAALFLRGFVQIGNCKTGISKS | 138 | KICHGLPNLGNTCYMNAVLQ |
| Ubiquitin | | KEAFIEAVERKKKDRLVLYFKS | | SLLSIPSFADDLLNQSFPWG |
| carboxyl- | | GKYSTFRLSDNIQNVVLKSYRG | | KIPLNALTMCLARLLFFKDT |
| terminal | | NQNHLHLTLQNNNGLFIEGLSS | | YNIEIKEMLLLNLKKAISAA |
| hydrolase 26 | | TDAEQLKIFLDRVHQNEVQPPV | | AEIFHGNAQNDAHEFLAHCL |
| | | RPGKGGSVFSSTTQKEINKTSF | | DQLKDNMEKLNTIWKPKSEF |
| | | HKVDEKSSSKSFEIAKGSGTGV | | GEDNFPKQVFADDPDTSGES |
| | | LQRMPLLTSKLTLTCGELSENQ | | CPVITNFELELLHSIACKAC |
| | | HKKRKRMLSSSSEMNEEFLKEN | | GQVILKTELNNYLSINLPQR |
| | | NSVEYKKSKADCSRCVSYNREK | | IKAHPSSIQSTEDLFFGAEE |
| | | QLKLKELEENKKLECESSCIMN | | LEYKCAKCEHKTSVGVHSES |
| | | ATGNPYLDDIGLLQALTEKMVL | | RLPRILIVHLKRYSLNEFCA |
| | | VFLLQQGYSDGYTKWDKLKLFF | | LKKNDQEVIISKYLKVSSHC |
| | | ELFPEKICHGLPNLGNTCYMNA | | NEGTRPPLPLSEDGEITDFQ |
| | | VLQSLLSIPSFADDLLNQSFPW | | LLKVIRKMTSGNISVSWPAT |
| | | GKIPLNALTMCLARLLFFKDTY | | KESKDILAPHIGSDKESEQK |
| | | NIEIKEMLLLNLKKAISAAAEI | | KGQTVFKGASRRQQQKYLGK |
| | | FHGNAQNDAHEFLAHCLDQLKD | | NSKPNELESVYSGDRAFIEK |
| | | NMEKLNTIWKPKSEFGEDNEPK | | EPLAHLMTYLEDTSLCQFHK |
| | | QVFADDPDTSGFSCPVITNFEL | | AGGKPASSPGTPLSKVDFQT |
| | | ELLHSIACKACGQVILKTELNN | | VPENPKRKKYVKTSKFVAFD |
| | | YLSINLPQRIKAHPSSIQSTED | | RIINPTKDLYEDKNIRIPER |
| | | LFFGAEELEYKCAKCEHKTSVG | | FQKVSEQTQQCDGMRICEQA |
| | | VHSFSRLPRILIVHLKRYSLNE | | PQQALPQSFPKPGTQGHTKN |
| | | FCALKKNDQEVIISKYLKVSSH | | LLRPTKLNLQKSNRNSLLAL |
| | | CNEGTRPPLPLSEDGEITDFQL | | GSNKNPRNKDILDKIKSKAK |
| | | LKVIRKMTSGNISVSWPATKES | | ETKRNDDKGDHTYRLISVVS |
| | | KDILAPHIGSDKESEQKKGQTV | | HLGKTLKSGHYICDAYDFEK |
| | | FKGASRRQQQKYLGKNSKPNEL | | QIWFTYDDMRVLGIQEAQMQ |
| | | ESVYSGDRAFIEKEPLAHLMTY | | EDRRCTGYIFFYMHN |
| | | LEDTSLCQFHKAGGKPASSPGT | | |
| | | PLSKVDFQTVPENPKRKKYVKT | | |
| | | SKFVAFDRIINPTKDLYEDKNI | | |
| | | RIPERFQKVSEQTQQCDGMRIC | | |
| | | EQAPQQALPQSFPKPGTQGHTK | | |
| | | NLLRPTKLNLQKSNRNSLLALG | | |
| | | SNKNPRNKDILDKIKSKAKETK | | |
| | | RNDDKGDHTYRLISVVSHLGKT | | |
| | | LKSGHYICDAYDFEKQIWFTYD | | |
| | | DMRVLGIQEAQMQEDRRCTGYI | | |
| | | FFYMHNEIFEEMLKREENAQLN | | |
| | | SKEVEETLQKE | | |
| UBP19_HUMAN | 27 | MSGGASATGPRRGPPGLEDTTS | 139 | LPGFTGLVNLGNTCEMNSVI |
| Ubiquitin | | KKKQKDRANQESKDGDPRKETG | | QSLSNTRELRDFFHDRSFEA |
| carboxyl- | | SRYVAQAGLEPLASGDPSASAS | | EINYNNPLGTGGRLAIGFAV |
| terminal | | HAAGITGSRHRTRLFFPSSSGS | | LLRALWKGTHHAFQPSKLKA |
| hydrolase 19 | | ASTPQEEQTKEGACEDPHDLLA | | IVASKASQFTGYAQHDAQEF |
| | | TPTPELLLDWRQSAEEVIVKLR | | MAFLLDGLHEDLNRIQNKPY |
| | | VGVGPLQLEDVDAAFTDTDCVV | | TETVDSDGRPDEVVAEEAWQ |
| | | RFAGGQQWGGVFYAEIKSSCAK | | RHKMRNDSFIVDLFQGQYKS |
| | | VQTRKGSLLHLTLPKKVPMLTW | | KLVCPVCAKVSITFDPFLYL |
| | | PSLLVEADEQLCIPPLNSQTCL | | PVPLPQKQKVLPVFYFAREP |
| | | LGSEENLAPLAGEKAVPPGNDP | | HSKPIKFLVSVSKENSTASE |
| | | VSPAMVRSRNPGKDDCAKEEMA | | VLDSLSQSVHVKPENLRLAE |
| | | VAADAATLVDEPESMVNLAFVK | | VIKNRFHRVELPSHSLDTVS |
| | | NDSYEKGPDSVVVHVYVKEICR | | PSDTLLCFELLSSELAKERV |
| | | DTSRVLFREQDETLIFQTRDGN | | VVLEVQQRPQVPSVPISKCA |
| | | FLRLHPGCGPHTTFRWQVKLRN | | ACQRKQQSEDEKLKRCTRCY |
| | | LIEPEQCTFCFTASRIDICLRK | | RVGYCNQLCQKTHWPDHKGL |
| | | RQSQRWGGLEAPAARVGGAKVA | | CRPENIGYPFLVSVPASRLT |
| | | VPTGPTPLDSTPPGGAPHPLTG | | YARLAQLLEGYARYSVSVFQ |
| | | QEEARAVEKDKSKARSEDTGLD | | PPFQPGRMALESQSPGCTTL |
| | | SVATRTPMEHVTPKPETHLASP | | LSTGSLEAGDSERDPIQPPE |
| | | KPTCMVPPMPHSPVSGDSVEEE | | LQLVTPMAEGDTGLPRVWAA |
| | | EEEEKKVCLPGFTGLVNLGNTC | | PDRGPVPSTSGISSEMLASG |
| | | FMNSVIQSLSNTRELRDFFHDR | | PIEVGSLPAGERVSRPEAAV |
| | | SFEAEINYNNPLGTGGRLAIGE | | PGYQHPSEAMNAHTPQFFIY |
| | | AVLLRALWKGTHHAFQPSKLKA | | KIDSSNREQRLEDKGDTPLE |
| | | IVASKASQFTGYAQHDAQEFMA | | LGDDCSLA |
| | | FLLDGLHEDLNRIQNKPYTETV | | LVWRNNERLQEFVLVASKEL |
| | | DSDGRPDEVVAEEAWQRHKMRN | | ECAEDPGSAGEAARAGHFTL |
| | | DSFIVDLFQGQYKSKLVCPVCA | | DQCLNLFTRPEVLAPEEAWY |
| | | KVSITFDPFLYLPVPLPQKQKV | | CPQCKQHREASKQLLLWRLP |
| | | LPVFYFAREPHSKPIKFLVSVS | | NVLIVQLKRFSFRSFIWRDK |
| | | KENSTASEVLDSLSQSVHVKPE | | INDLVEFPVRNLDLSKFCIG |
| | | NLRLAEVIKNRFHRVELPSHSL | | QKEEQLPSYDLYAVINHYGG |
| | | DTVSPSDTLLCFELLSSELAKE | | MIGGHYTACARLPNDRSSQR |
| | | RVVVLEVQQRPQVPSVPISKCA | | SDVGWRLEDDSTVTTVDESQ |
| | | ACQRKQQSEDEKLKRCTRCYRV | | VVTRYAYVLFYRRRN |
| | | GYCNQLCQKTHWPDHKGLCRPE | | |
| | | NIGYPFLVSVPASRLTYARLAQ | | |
| | | LLEGYARYSVSVFQPPFQPGRM | | |
| | | ALESQSPGCTTLLSTGSLEAGD | | |
| | | SERDPIQPPELQLVTPMAEGDT | | |
| | | GLPRVWAAPDRGPVPSTSGISS | | |
| | | EMLASGPIEVGSLPAGERVSRP | | |
| | | EAAVPGYQHPSEAMNAHTPQFF | | |
| | | IYKIDSSNREQRLEDKGDTPLE | | |
| | | LGDDCSLALVWRNNERLQEFVL | | |
| | | VASKELECAEDPGSAGEAARAG | | |
| | | HFTLDQCLNLFTRPEVLAPEEA | | |
| | | WYCPQCKQHREASKQLLLWRLP | | |
| | | NVLIVQLKRFSFRSFIWRDKIN | | |
| | | DLVEFPVRNLDLSKFCIGQKEE | | |
| | | QLPSYDLYAVINHYGGMIGGHY | | |
| | | TACARLPNDRSSQRSDVGWRLF | | |
| | | DDSTVTTVDESQVVTRYAYVLE | | |
| | | YRRRNSPVERPPRAGHSEHHPD | | |
| | | LGPAAEAAASQASRIWQELEAE | | |
| | | EEPVPEGSGPLGPWGPQDWVGP | | |
| | | LPRGPTTPDEGCLRYFVLGTVA | | |
| | | ALVALVLNVFYPLVSQSRWR | | |
| UBP10_HUMAN | 28 | MALHSPQYIFGDESPDEFNQFF | 140 | SLQPRGLINKGNWCYINATL |
| Ubiquitin | | VTPRSSVELPPYSGTVLCGTQA | | QALVACPPMYHLMKFIPLYS |
| carboxyl- | | VDKLPDGQEYQRIEFGVDEVIE | | KVQRPCTSTPMIDSFVRLMN |
| terminal | | PSDTLPRTPSYSISSTLNPQAP | | EFTNMPVPPKPRQALGDKIV |
| hydrolase 10 | | EFILGCTASKITPDGITKEASY | | RDIRPGAAFEPTYIYRLLTV |
| | | GSIDCQYPGSALALDGSSNVEA | | NKSSLSEKGRQEDAEEYLGF |
| | | EVLENDGVSGGLGQRERKKKKK | | ILNGLHEEMLNLKKLLSPSN |
| | | RPPGYYSYLKDGGDDSISTEAL | | EKLTISNGPKNHSVNEEEQE |
| | | VNGHANSAVPNSVSAEDAEFMG | | EQGEGSEDEWEQVGPRNKTS |
| | | DMPPSVTPRTCNSPQNSTDSVS | | VTRQADFVQTPITGIFGGHI |
| | | DIVPDSPFPGALGSDTRTAGQP | | RSVVYQQSSKESATLQPFFT |
| | | EGGPGADFGQSCFPAEAGRDTL | | LQLDIQSDKIRTVQDALESL |
| | | SRTAGAQPCVGTDTTENLGVAN | | VARESVQGYTTKTKQEVEIS |
| | | GQILESSGEGTATN | | RRVTLEKLPPVLVLHLKRFV |
| | | GVELHTTESIDLDPTKPESASP | | YEKTGGCQKLIKNIEYPVDL |
| | | PADGTGSASGTLPVSQPKSWAS | | EISKELLSPGVKNKNEKCHR |
| | | LFHDSKPSSSSPVAYVETKYSP | | TYRLFAVVYHHGNSATGGHY |
| | | PAISPLVSEKQVEVKEGLVPVS | | TTDVFQIGLNGWLRIDDQTV |
| | | EDPVAIKIAELLENVTLIHKPV | | KVINQYQVVKPTAERTAYLL |
| | | SLQPRGLINKGNWCYINATLQA | | YYRRVD |
| | | LVACPPMYHLMKFIPLYSKVQR | | |
| | | PCTSTPMIDSFVRLMNEFTNMP | | |
| | | VPPKPRQALGDKIVRDIRPGAA | | |
| | | FEPTYIYRLLTVNKSSLSEKGR | | |
| | | QEDAEEYLGFILNGLHEEMLNL | | |
| | | KKLLSPSNEKLTISNGPKNHSV | | |
| | | NEEEQEEQGEGSEDEWEQVGPR | | |
| | | NKTSVTRQADFVQT | | |
| | | PITGIFGGHIRSVVYQQSSKES | | |
| | | ATLQPFFTLQLDIQSDKIRTVQ | | |
| | | DALESLVARESVQGYTTKTKQE | | |
| | | VEISRRVTLEKLPPVLVLHLKR | | |
| | | FVYEKTGGCQKLIKNIEYPVDL | | |
| | | EISKELLSPGVKNKNFKCHRTY | | |
| | | RLFAVVYHHGNSATGGHYTTDV | | |
| | | FQIGLNGWLRIDDQTVKVINQY | | |
| | | QVVKPTAERTAYLLYYRRVDLL | | |
| UBP49_HUMAN | 29 | MDRCKHVGRLRLAQDHSILNPQ | 141 | MDRCKHVGRLRLAQDHSILN |
| Ubiquitin | | KWCCLECATTESVWACLKCSHV | | PQKWCCLECATTESVWACLK |
| carboxyl- | | ACGRYIEDHALKHFEETGHPLA | | CSHVACGRYIEDHALKHFEE |
| terminal | | MEVRDLYVFCYLCKDYVLNDNP | | TGHPLAMEVRDLYVFCYLCK |
| hydrolase 49 | | EGDLKLLRSSLLAVRGQKQDTP | | DYVLNDNPEGDLKLLRSSLL |
| | | VRRGRTLRSMASGEDVVLPQRA | | AVRGQKQDTPVRRGRTLRSM |
| | | PQGQPQMLTALWYRRQRLLART | | ASGEDVVLPQRAPQGQPQML |
| | | LRLWFEKSSRGQAKLEQRRQEE | | TALWYRRQRLLARTLRLWFE |
| | | ALERKKEEARRRRREVKRRLLE | | KSSRGQAKLEQRRQEEALER |
| | | ELASTPPRKSARLLLHTPRDAG | | KKEEARRRRREVKRRLLEEL |
| | | PAASRPAALPTSRRVPAATLKL | | ASTPPRKSARLLLHTPRDAG |
| | | RRQPAMAPGVTGLRNLGNTCYM | | PAASRPAALPTSRRVPAATL |
| | | NSILQVLSHLQKFRECELNLDP | | KLRRQPAMAPGVTGLRNLGN |
| | | SKTEHLFPKATNGK | | TCYMNSILQVLSHLQKFREC |
| | | TQLSGKPTNSSATELSLRNDRA | | FLNLDPSKTEHLFPKATNGK |
| | | EACEREGFCWNGRASISRSLEL | | TQLSGKPTNSSATELSLRND |
| | | IQNKEPSSKHISLCRELHTLER | | RAEACEREGFCWNGRASISR |
| | | VMWSGKWALVSPFAMLHSVWSL | | SLELIQNKEPSSKHISLCRE |
| | | IPAFRGYDQQDAQEFLCELLHK | | LHTLFRVMWSGKWALVSPFA |
| | | VQQELESEGTTRRILIPFSQRK | | MLHSVWSLIPAFRGYDQQDA |
| | | LTKQVLKVVNTIFHGQLLSQVT | | QEFLCELLHKVQQELESEGT |
| | | CISCNYKSNTIEPFWDLSLEEP | | TRRILIPFSQRKLTKQVLKV |
| | | ERYHCIEKGFVPLNQTECLLTE | | VNTIFHGQLLSQVTCISCNY |
| | | MLAKFTETEALEGRIYACDQCN | | KSNTIEPFWDLSLEFPERYH |
| | | SKRRKSNPKPLVLSEARKQLMI | | CIEKGFVPLNQTECLLTEML |
| | | YRLPQVLRLHLKRFRWSGRNHR | | AKFTETEALEGRIYACDQCN |
| | | EKIGVHVVEDQVLTMEPYCCRD | | SKRRKSNPKPLVLSEARKQL |
| | | MLSSLDKETFAYDL | | MIYRLPQVLRLHLKRFRWSG |
| | | SAVVMHHGKGFGSGHYTAYCYN | | RNHREKIGVHVVEDQVLTME |
| | | TEGGFWVHCNDSKLNVCSVEEV | | PYCCRDMLSSLDKETFAYDL |
| | | CKTQAYILFYTQRTVQGNARIS | | SAVVMHHGKGFGSGHYTAYC |
| | | ETHLQAQVQSSNNDEGRPQTES | | YNTEGGFWVHCNDSKLNVCS |
| | | | | VEEVCKTQAYILFYTQRT |
| U17L8_HUMAN | 30 | MEDDSLYLGGEWQFNHFSKLTS | 142 | AVGAGLQNMGNTCYLNASLQ |
| Inactive | | PRPDAAFAEIQRTSLPEKSPLS | | CLTYTPPLANYMLSREHSQT |
| ubiquitin | | SETRVDLCDDLAPVARQLAPRE | | CQRPKCCMLCTMQAHITWAL |
| carboxyl- | | KLPLSSRRPAAVGAGLQNMGNT | | HSPGHVIQPSQALAAGFHRG |
| terminal | | CYLNASLQCLTYTPPLANYMLS | | KQEDAHEFLMFTVDAMKKAC |
| hydrolase 17- | | REHSQTCQRPKCCMLCTMQAHI | | LPGHKQVDHHSKDTTLIHQI |
| like protein 8 | | TWALHSPGHVIQPSQALAAGFH | | FGGCWRSQIKCLHCHGISDT |
| | | RGKQEDAHEFLMFTVDAMKKAC | | FDPYLDIALDIQAAQSVKQA |
| | | LPGHKQVDHHSKDTTLIHQIFG | | LEQLVKPEELNGENAYPCGL |
| | | GCWRSQIKCLHCHGISDTEDPY | | CLQRAPASNTLTLHTSAKVL |
| | | LDIALDIQAAQSVKQALEQLVK | | ILVLKRFCDVTGNKLAKNVQ |
| | | PEELNGENAYPCGLCLQRAPAS | | YPECLDMQPYMSQQNTGPLV |
| | | NTLTLHTSAKVLILVLKRFCDV | | YVLYAVLVHAGWSCHNGYYF |
| | | TGNKLAKNVQYPEC | | SYVKAQEGQWYKMDDAEVTA |
| | | LDMQPYMSQQNTGPLVYVLYAV | | CSITSVLSQQAYVLFYIQKS |
| | | LVHAGWSCHNGYYFSYVKAQEG | | |
| | | QWYKMDDAEVTACSITSVLSQQ | | |
| | | AYVLFYIQKSEWERHSESVSRG | | |
| | | REPRALGAEDTDRPATQGELKR | | |
| | | DHPCLQVPELDEHLVERATEES | | |
| | | TLDHWKFPQEQNKMKPEFNVRK | | |
| | | VEGTLPPNVLVIHQSKYKCGMK | | |
| | | NHHPEQQSSLLNLSSMNSTDQE | | |
| | | SMNTGTLASLQGRTRRSKGKNK | | |
| | | HSKRSLLVCQ | | |
| 6VN6_1 | 31 | GSKKHTGYVGLKNQGATCYMNS | 143 | TGYVGLKNQGATCYMNSLLQ |
| | | LLQTLFFTNQLRKAVYMMPTEG | | TLFFTNQLRKAVYMMPTEGD |
| | | DDSSKSVPLALQRVFYELQHSD | | DSSKSVPLALQRVFYELQHS |
| | | KPVGTKKLTKSFGWETLDSEMQ | | DKPVGTKKLTKSFGWETLDS |
| | | HDVQELCRVLLDNVENKMKGTC | | FMQHDVQELCRVLLDNVENK |
| | | VEGTIPKLFRGKMVSYIQCKEV | | MKGTCVEGTIPKLFRGKMVS |
| | | DYRSDRREDYYDIQLSIKGKKN | | YIQCKEVDYRSDRREDYYDI |
| | | IFESFVDYVAVEQLDGDNKYDA | | QLSIKGKKNIFESFVDYVAV |
| | | GEHGLQEAEKGVKFLTLPPVLH | | EQLDGDNKYDAGEHGLQEAE |
| | | LQLMRFMYDPQTDQNIKINDRE | | KGVKFLTLPPVLHLQLMREM |
| | | EFPEQLPLDEFLQKTDPKDPAN | | YDPQTDQNIKINDRFEFPEQ |
| | | YILHAVLVHSGDNHGGHYVVYL | | LPLDEFLQKTDPKDPANYIL |
| | | NPKGDGKWCKFDDDVVSRCTKE | | HAVLVHSGDNHGGHYVVYLN |
| | | EAIEHNYGGHDDDLSVRHCTNA | | PKGDGKWCKFDDDVVSRCTK |
| | | YMLVYIRESKLSEVLQAVTDHD | | EEAIEHNYGGHDDDLSVRHC |
| | | IPQQLVERLQEEKRIEAQKR | | TNAYMLVYIRE |
| 6DGF_1 | 32 | AQGLAGLRNLGNTCEMNSILQC | 144 | AQGLAGLRNLGNTCEMNSIL |
| | | LSNTRELRDYCLQRLYMRDLHH | | QCLSNTRELRDYCLQRLYMR |
| | | GSNAHTALVEEFAKLIQTIWTS | | DLHHGSNAHTALVEEFAKLI |
| | | SPNDVVSPSEFKTQIQRYAPRE | | QTIWTSSPNDVVSPSEFKTQ |
| | | VGYNQQDAQEFLRELLDGLHNE | | IQRYAPRFVGYNQQDAQEFL |
| | | VNRVTLRPKSNPENLDHLPDDE | | RFLLDGLHNEVNRVTLRPKS |
| | | KGRQMWRKYLEREDSRIGDLFV | | NPENLDHLPDDEKGRQMWRK |
| | | GQLKSSLTCTDCGYCSTVEDPF | | YLEREDSRIGDLFVGQLKSS |
| | | WDLSLPIAKRGYPEVTLMDCMR | | LTCTDCGYCSTVEDPEWDLS |
| | | LFTKEDVLDGDEKPTCCRCRGR | | LPIAKRGYPEVTLMDCMRLF |
| | | KRCIKKFSIQRFPKILVLHLKR | | TKEDVLDGDEKPTCCRCRGR |
| | | FSESRIRTSKLTTFVNFPLRDL | | KRCIKKFSIQRFPKILVLHL |
| | | DLREFASENTNHAVYNLYAVSN | | KRFSESRIRTSKLTTFVNFP |
| | | HSGTTMGGHYTAYCRSPGTGEW | | LRDLDLREFASENTNHAVYN |
| | | HTFNDSSVTPMSSSQVRTSDAY | | LYAVSNHSGTTMGGHYTAYC |
| | | LLFYELASPPSRM | | RSPGTGEWHTENDSSVTPMS |
| | | | | SSQVRTSDAYLLFYELAS |
| 2VHF_1 | 33 | GLEIMIGKKKGIQGHYNSCYLD | 145 | MIGKKKGIQGHYNSCYLDST |
| | | STLFCLFAFSSVLDTVLLRPKE | | LFCLFAFSSVLDTVLLRPKE |
| | | KNDVEYYSETQELLRTEIVNPL | | KNDVEYYSETQELLRTEIVN |
| | | RIYGYVCATKIMKLRKILEKVE | | PLRIYGYVCATKIMKLRKIL |
| | | AASGFTSEEKDPEEFLNILFHH | | EKVEAASGFTSEEKDPEEFL |
| | | ILRVEPLLKIRSAGQKVQDCYF | | NILFHHILRVEPLLKIRSAG |
| | | YQIFMEKNEKVGVPTIQQLLEW | | QKVQDCYFYQIFMEKNEKVG |
| | | SFINSNLKFAEAPSCLIIQMPR | | VPTIQQLLEWSFINSNLKFA |
| | | FGKDFKLFKKIFPSLELNITDL | | EAPSCLIIQMPRFGKDFKLE |
| | | LEDTPRQCRICGGLAMYECREC | | KKIFPSLELNITDLLEDTPR |
| | | YDDPDISAGKIKQFCKTCNTQV | | QCRICGGLAMYECRECYDDP |
| | | HLHPKRLNHKYNPVSLPKDLPD | | DISAGKIKQFCKTCNTQVHL |
| | | WDWRHGCIPCQNMELFAVLCIE | | HPKRLNHKYNPVSLPKDLPD |
| | | TSHYVAFVKYGKDDSAWLFFDS | | WDWRHGCIPCQNMELFAVLC |
| | | MADRDGGQNGENIPQVTPCPEV | | IETSHYVAFVKYGKDDSAWL |
| | | GEYLKMSLEDLHSLDSRRIQGC | | FFDSMADRDGGQNGFNIPQV |
| | | ARRLLCDAYMCMYQSPTMSLYK | | TPCPEVGEYLKMSLEDLHSL |
| | | | | DSRRIQGCARRLLCDAYMCM |
| | | | | YQS |
| U17LI_HUMAN | 34 | MEDDSLYLGGEWQFNHESKLTS | 146 | AVGAGLQNMGNTCYVNASLQ |
| Ubiquitin | | SRPDAAFAEIQRTSLPEKSPLS | | CLTYTPPLANYMLSREHSQT |
| carboxyl- | | CETRVDLCDDLAPVARQLAPRE | | CHRHKGCMLCTMQAHITRAL |
| terminal | | KLPLSSRRPAAVGAGLQNMGNT | | HNPGHVIQPSQALAAGFHRG |
| hydrolase 17- | | CYVNASLQCLTYTPPLANYMLS | | KQEDAHEFLMFTVDAMKKAC |
| like protein 18 | | REHSQTCHRHKGCMLCTMQAHI | | LPGHKQVDHHSKDTTLIHQI |
| | | TRALHNPGHVIQPSQALAAGFH | | FGGYWRSQIKCLHCHGISDT |
| | | RGKQEDAHEFLMFTVDAMKKAC | | FDPYLDIALDIQAAQSVQQA |
| | | LPGHKQVDHHSKDTTLIHQIFG | | LEQLVKPEELNGENAYHCGV |
| | | GYWRSQIKCLHCHGISDTFDPY | | CLQRAPASKTLTLHTSAKVL |
| | | LDIALDIQAAQSVQQALEQLVK | | ILVLKRFSDVTGNKIAKNVQ |
| | | PEELNGENAYHCGVCLQRAPAS | | YPECLDMQPYMSQTNTGPLV |
| | | KTLTLHTSAKVLILVLKRFSDV | | YVLYAVLVHAGWSCHNGHYF |
| | | TGNKIAKNVQYPEC | | SYVKAQEGQWYKMDDAEVTA |
| | | LDMQPYMSQTNTGPLVYVLYAV | | SSITSVLSQQAYVLFYIQKS |
| | | LVHAGWSCHNGHYFSYVKAQEG | | |
| | | QWYKMDDAEVTASSITSVLSQQ | | |
| | | AYVLFYIQKSEWERHSESVSRG | | |
| | | REPRALGAEDTDRRAKQGELKR | | |
| | | DHPCLQAPELDEHLVERATQES | | |
| | | TLDHWKFLQEQNKTKPEFNVRK | | |
| | | VEGTLPPDVLVIHQSKYKCGMK | | |
| | | NHHPEQQSSLLNLSSTTPTHQE | | |
| | | SMNTGTLASLRGRARRSKGKNK | | |
| | | HSKRALLVCQ | | |
| UBP22_HUMAN | 35 | MVSRPEPEGEAMDAELAVAPPG | 147 | LGNTCFMNCIVQALTHTPLL |
| Ubiquitin | | CSHLGSFKVDNWKQNLRAIYQC | | RDFFLSDRHRCEMQSPSSCL |
| carboxyl- | | FVWSGTAEARKRKAKSCICHVC | | VCEMSSLFQEFYSGHRSPHI |
| terminal | | GVHLNRLHSCLYCVFFGCFTKK | | PYKLLHLVWTHARHLAGYEQ |
| hydrolase 22 | | HIHEHAKAKRHNLAIDLMYGGI | | QDAHEFLIAALDVLHRHCKG |
| | | YCFLCQDYIYDKDMEIIAKEEQ | | DDNGKKANNPNHCNCIIDQI |
| | | RKAWKMQGVGEKESTWEPTKRE | | FTGGLQSDVTCQVCHGVSTT |
| | | LELLKHNPKRRKITSNCTIGLR | | IDPFWDISLDLPGSSTPFWP |
| | | GLINLGNTCEMNCIVQALTHTP | | LSPGSEGNVVNGESHVSGTT |
| | | LLRDFFLSDRHRCEMQSPSSCL | | TLTDCLRRFTRPEHLGSSAK |
| | | VCEMSSLFQEFYSGHRSPHIPY | | IKCSGCHSYQESTKQLTMKK |
| | | KLLHLVWTHARHLAGYEQQDAH | | LPIVACFHLKRFEHSAKLRR |
| | | EFLIAALDVLHRHCKGDDNGKK | | KITTYVSFPLELDMTPFMAS |
| | | ANNPNHCNCIIDQIFTGGLQSD | | SKESRMNGQYQQPTDSLNND |
| | | VTCQVCHGVSTTIDPFWDISLD | | NKYSLFAVVNHQGTLESGHY |
| | | LPGSSTPFWPLSPGSEGNVVNG | | TSFIRQHKDQWFKCDDAIIT |
| | | ESHVSGTTTLTDCLRRETRPEH | | KASIKDVLDSEGYLLFYHKQ |
| | | LGSSAKIKCSGCHSYQESTKQL | | F |
| | | TMKKLPIVACFHLKRFEHSAKL | | |
| | | RRKITTYVSFPLELDMTPEMAS | | |
| | | SKESRMNGQYQQPTDSLNNDNK | | |
| | | YSLFAVVNHQGTLESGHYTSFI | | |
| | | RQHKDQWFKCDDAIITKASIKD | | |
| | | VLDSEGYLLFYHKQFLEYE | | |
| UBP18_HUMAN | 36 | MSKAFGLLRQICQSILAESSQS | 148 | KGLVPGLVNLGNTCEMNSLL |
| Ubl | | PADLEEKKEEDSNMKREQPRER | | QGLSACPAFIRWLEEFTSQY |
| carboxyl- | | PRAWDYPHGLVGLHNIGQTCCL | | SRDQKEPPSHQYLSLTLLHL |
| terminal | | NSLIQVFVMNVDFTRILKRITV | | LKALSCQEVTDDEVLDASCL |
| hydrolase 18 | | PRGADEQRRSVPFQMLLLLEKM | | LDVLRMYRWQISSFEEQDAH |
| | | QDSRQKAVRPLELAYCLQKCNV | | ELFHVITSSLEDERDRQPRV |
| | | PLFVQHDAAQLYLKLWNLIKDQ | | THLFDVHSLEQQSEITPKQI |
| | | ITDVHLVERLQALYTIRVKDSL | | TCRTRGSPHPTSNHWKSQHP |
| | | ICVDCAMESSRNSSMLTLPLSL | | FHGRLTSNMVCKHCEHQSPV |
| | | FDVDSKPLKTLEDALHCFFQPR | | RFDTFDSLSLSIPAATWGHP |
| | | ELSSKSKCFCENCGKKTRGKQV | | LTLDHCLHHFISSESVRDVV |
| | | LKLTHLPQTLTIHLMRESIRNS | | CDNCTKIEAKGTLNGEKVEH |
| | | QTRKICHSLYFPQSLDESQILP | | QRTTFVKQLKLGKLPQCLCI |
| | | MKRESCDAEEQSGG | | HLQRLSWSSHGTPLKRHEHV |
| | | QYELFAVIAHVGMADSGHYCVY | | QFNEFLMMDIYKYHLLGHKP |
| | | IRNAVDGKWFCENDSNICLVSW | | SQHNPKLNKNPGPTLELQDG |
| | | EDIQCTYGNPNYHWQETAYLLV | | PGAPTPVLNQPGAPKTQIFM |
| | | YMKMEC | | NGACSPSLLPTLSAPMPFPL |
| | | | | PVVPDYSSSTYLERLMAVVV |
| | | | | HHGDMHSGHFVTYRRSPPSA |
| | | | | RNPLSTSNQWLWVSDDTVRK |
| | | | | ASLQEVLSSSAYLLFYERVL |
| UBP28_HUMAN | 37 | MTAELQQDDAAGAADGHGSSCQ | 149 | GWPVGLKNVGNTCWFSAVIQ |
| Ubiquitin | | MLLNQLREITGIQDPSFLHEAL | | SLFQLPEFRRLVLSYSLPQN |
| carboxyl- | | KASNGDITQAVSLLTDERVKEP | | VLENCRSHTEKRNIMFMQEL |
| terminal | | SQDTVATEPSEVEGSAANKEVL | | QYLFALMMGSNRKFVDPSAA |
| hydrolase 28 | | AKVIDLTHDNKDDLQAAIALSL | | LDLLKGAFRSSEEQQQDVSE |
| | | LESPKIQADGRDLNRMHEATSA | | FTHKLLDWLEDAFQLAVNVN |
| | | ETKRSKRKRCEVWGENPNPNDW | | SPRNKSENPMVQLFYGTELT |
| | | RRVDGWPVGLKNVGNTCWFSAV | | EGVREGKPFCNNETFGQYPL |
| | | IQSLFQLPEFRRLVLSYSLPQN | | QVNGYRNLDECLEGAMVEGD |
| | | VLENCRSHTEKRNIMFMQELQY | | VELLPSDHSVKYGQERWFTK |
| | | LFALMMGSNRKFVDPSAALDLL | | LPPVLTFELSRFEFNQSLGQ |
| | | KGAFRSSEEQQQDVSEFTHKLL | | PEKIHNKLEFPQIIYMDRYM |
| | | DWLEDAFQLAVNVNSPRNKSEN | | YRSKELIRNKRECIRKLKEE |
| | | PMVQLFYGTELTEG | | IKILQQKLERYVKYGSGPAR |
| | | VREGKPFCNNETFGQYPLQVNG | | FPLPDMLKYVIEFASTKPAS |
| | | YRNLDECLEGAMVEGDVELLPS | | ESCPPESDTHMTLPLSSVHC |
| | | DHSVKYGQERWFTKLPPVLTFE | | SVSDQTSKESTSTESSSQDV |
| | | LSRFEFNQSLGQPEKIHNKLEF | | ESTESSPEDSLPKSKPLTSS |
| | | PQIIYMDRYMYRSKELIRNKRE | | RSSMEMPSQPAPRTVTDEEI |
| | | CIRKLKEEIKILQQKLERYVKY | | NFVKTCLQRWRSEIEQDIQD |
| | | GSGPARFPLPDMLKYVIEFAST | | LKTCIASTTQTIEQMYCDPL |
| | | KPASESCPPESDTHMTLPLSSV | | LRQVPYRLHAVLVHEGQANA |
| | | HCSVSDQTSKESTSTESSSQDV | | GHYWAYIYNQPRQSWLKYND |
| | | ESTESSPEDSLPKSKPLTSSRS | | ISVTESSWEEVERDSYGGLR |
| | | SMEMPSQPAPRTVTDEEINFVK | | NVSAYCLMYINDKLPY |
| | | TCLQRWRSEIEQDIQDLKTCIA | | |
| | | STTQTIEQMYCDPLLRQVPYRL | | |
| | | HAVLVHEGQANAGHYWAYIYNQ | | |
| | | PRQSWLKYNDISVTESSWEEVE | | |
| | | RDSYGGLRNVSAYCLMYINDKL | | |
| | | PYFNAEAAPTESDQMSEVEALS | | |
| | | VELKHYIQEDNWRFEQEVEEWE | | |
| | | EEQSCKIPQMESSINSSSQDYS | | |
| | | TSQEPSVASSHGVRCLSSEHAV | | |
| | | IVKEQTAQAIANTARAYEKSGV | | |
| | | EAALSEVMLSPAMQGVILAIAK | | |
| | | ARQTFDRDGSEAGLIKAFHEEY | | |
| | | SRLYQLAKETPTSHSDPRLQHV | | |
| | | LVYFFQNEAPKRVVERTLLEQF | | |
| | | ADKNLSYDERSISIMKVAQAKL | | |
| | | KEIGPDDMNMEEYKKWHEDYSL | | |
| | | FRKVSVYLLTGLELYQKGKYQE | | |
| | | ALSYLVYAYQSNAALLMKGPRR | | |
| | | GVKESVIALYRRKCLLELNAKA | | |
| | | ASLFETNDDHSVTEGINVMNEL | | |
| | | IIPCIHLIINNDISKDDLDAIE | | |
| | | VMRNHWCSYLGQDIAENLQLCL | | |
| | | GEFLPRLLDPSAEIIVLKEPPT | | |
| | | IRPNSPYDLCSRFAAVMESIQG | | |
| | | VSTVTVK | | |
| U17L2_HUMAN | 38 | MEDDSLYLGGEWQFNHESKLTS | 150 | AVGAGLQNMGNTCYENASLQ |
| Ubiquitin | | SRPDAAFAEIQRTSLPEKSPLS | | CLTYTPPLANYMLSREHSQT |
| carboxyl- | | SEARVDLCDDLAPVARQLAPRK | | CQRPKCCMLCTMQAHITWAL |
| terminal | | KLPLSSRRPAAVGAGLQNMGNT | | HSPGHVIQPSQALAAGFHRG |
| hydrolase 17 | | CYENASLQCLTYTPPLANYMLS | | KQEDAHEFLMFTVDAMKKAC |
| | | REHSQTCQRPKCCMLCTMQAHI | | LPGHKQVDHHSKDTTLIHQI |
| | | TWALHSPGHVIQPSQALAAGFH | | FGGCWRSQIKCLHCHGISDT |
| | | RGKQEDAHEFLMFTVDAMKKAC | | FDPYLDIALDIQAAQSVKQA |
| | | LPGHKQVDHHSKDTTLIHQIFG | | LEQLVKPEELNGENAYHCGL |
| | | GCWRSQIKCLHCHGISDTFDPY | | CLQRAPASKTLTLHTSAKVL |
| | | LDIALDIQAAQSVKQALEQLVK | | ILVLKRFSDVTGNKLAKNVQ |
| | | PEELNGENAYHCGLCLQRAPAS | | YPECLDMQPYMSQQNTGPLV |
| | | KTLTLHTSAKVLILVLKRESDV | | YVLYAVLVHAGWSCHDGHYF |
| | | TGNKLAKNVQYPEC | | SYVKAQEGQWYKMDDAKVTA |
| | | LDMQPYMSQQNTGPLVYVLYAV | | CSITSVLSQQAYVLFYIQKS |
| | | LVHAGWSCHDGHYFSYVKAQEG | | |
| | | QWYKMDDAKVTACSITSVLSQQ | | |
| | | AYVLFYIQKSEWERHSESVSRG | | |
| | | REPRALGAEDTDRRATQGELKR | | |
| | | DHPCLQAPELDERLVERATQES | | |
| | | TLDHWKFPQEQNKTKPEFNVRK | | |
| | | VEGTLPPNVLVIHQSKYKCGMK | | |
| | | NHHPEQQSSLLNLSSTTRTDQE | | |
| | | SVNTGTLASLQGRTRRSKGKNK | | |
| | | HSKRALLVCQ | | |
| UBP31_HUMAN | 39 | MSKVTAPGSGPPAAASGKEKRS | 151 | PVPGVAGLRNHGNTCFMNAT |
| Ubiquitin | | FSKRLERSGRAGGGGAGGPGAS | | LQCLSNTELFAEYLALGQYR |
| carboxyl- | | GPAAPSSPSSPSSARSVGSEMS | | AGRPEPSPDPEQPAGRGAQG |
| terminal | | RVLKTLSTLSHLSSEGAAPDRG | | QGEVTEQLAHLVRALWTLEY |
| hydrolase 31 | | GLRSCFPPGPAAAPTPPPCPPP | | TPQHSRDFKTIVSKNALQYR |
| | | PASPAPPACAAEPVPGVAGLRN | | GNSQHDAQEFLLWLLDRVHE |
| | | HGNTCFMNATLQCLSNTELFAE | | DLNHSVKQSGQPPLKPPSET |
| | | YLALGQYRAGRPEPSPDPEQPA | | DMMPEGPSFPVCSTFVQELF |
| | | GRGAQGQGEVTEQLAHLVRALW | | QAQYRSSLTCPHCQKQSNTF |
| | | TLEYTPQHSRDEKTIVSKNALQ | | DPFLCISLPIPLPHTRPLYV |
| | | YRGNSQHDAQEFLLWLLDRVHE | | TVVYQGKCSHCMRIGVAVPL |
| | | DLNHSVKQSGQPPLKPPSETDM | | SGTVARLREAVSMETKIPTD |
| | | MPEGPSFPVCSTFVQELFQAQY | | QIVLTEMYYDGFHRSFCDTD |
| | | RSSLTCPHCQKQSN | | DLETVHESDCIFAFETPEIF |
| | | TFDPFLCISLPIPLPHTRPLYV | | RPEGILSQRGIHLNNNLNHL |
| | | TVVYQGKCSHCMRIGVAVPLSG | | KFGLDYHRLSSPTQTAAKQG |
| | | TVARLREAVSMETKIPTDQIVL | | KMDSPTSRAGSDKIVLLVCN |
| | | TEMYYDGFHRSFCDTDDLETVH | | RACTGQQGKRFGLPFVLHLE |
| | | ESDCIFAFETPEIFRPEGILSQ | | KTIAWDLLQKEILEKMKYFL |
| | | RGIHLNNNLNHLKFGLDYHRLS | | RPTVCIQVCPFSLRVVSVVG |
| | | SPTQTAAKQGKMDSPTSRAGSD | | ITYLLPQEEQPLCHPIVE |
| | | KIVLLVCNRACTGQQGKRFGLP | | RALKSCGPGGTAHVKLVVEW |
| | | FVLHLEKTIAWDLLQKEILEKM | | DKETRDELFVNTEDEYIPDA |
| | | KYFLRPTVCIQVCPFSLRVVSV | | ESVRLQRERHHQPQTCTLSQ |
| | | VGITYLLPQEEQPLCHPIVERA | | CFQLYTKEERLAPDDAWRCP |
| | | LKSCGPGGTAHVKLVVEWDKET | | HCKQLQQGSITLSLWTLPDV |
| | | RDELFVNTEDEYIPDAESVRLQ | | LIIHLKRFRQEGDRRMKLQN |
| | | RERHHQPQTCTLSQ | | MVKFPLTGLDMTPHVVKRSQ |
| | | CFQLYTKEERLAPDDAWRCPHC | | SSWSLPSHWSPWRRPYGLGR |
| | | KQLQQGSITLSLWTLPDVLIIH | | DPEDYIYDLYAVCNHHGTMQ |
| | | LKRFRQEGDRRMKLQNMVKFPL | | GGHYTAYCKNSVDGLWYCFD |
| | | TGLDMTPHVVKRSQSSWSLPSH | | DSDVQQLSEDEVCTQTAYIL |
| | | WSPWRRPYGLGRDPEDYIYDLY | | FYQRRT |
| | | AVCNHHGTMQGGHYTAYCKNSV | | |
| | | DGLWYCFDDSDVQQLSEDEVCT | | |
| | | QTAYILFYQRRTAIPSWSANSS | | |
| | | VAGSTSSSLCEHWVSRLPGSKP | | |
| | | ASVTSAASSRRTSLASLSESVE | | |
| | | MTGERSEDDGGFSTRPFVRSVQ | | |
| | | RQSLSSRSSVTSPLAVNENCMR | | |
| | | PSWSLSAKLQMRSNSPSRESGD | | |
| | | SPIHSSASTLEKIG | | |
| | | EAADDKVSISCFGSLRNLSSSY | | |
| | | QEPSDSHSRREHKAVGRAPLAV | | |
| | | MEGVFKDESDTRRLNSSVVDTQ | | |
| | | SKHSAQGDRLPPLSGPFDNNNQ | | |
| | | IAYVDQSDSVDSSPVKEVKAPS | | |
| | | HPGSLAKKPESTTKRSPSSKGT | | |
| | | SEPEKSLRKGRPALASQESSLS | | |
| | | STSPSSPLPVKVSLKPSRSRSK | | |
| | | ADSSSRGSGRHSSPAPAQPKKE | | |
| | | SSPKSQDSVSSPSPQKQKSASA | | |
| | | LTYTASSTSAKKASGPATRSPF | | |
| | | PPGKSRTSDHSLSREGSRQSLG | | |
| | | SDRASATSTSKPNSPRVSQARA | | |
| | | GEGRGAGKHVRSSS | | |
| | | MASLRSPSTSIKSGLKRDSKSE | | |
| | | DKGLSFFKSALRQKETRRSTDL | | |
| | | GKTALLSKKAGGSSVKSVCKNT | | |
| | | GDDEAERGHQPPASQQPNANTT | | |
| | | GKEQLVTKDPASAKHSLLSARK | | |
| | | SKSSQLDSGVPSSPGGRQSAEK | | |
| | | SSKKLSSSMQTSARPSQKPQ | | |
| U17LJ_HUMAN | 40 | MEEDSLYLGGEWQFNHESKLTS | 152 | AVGAGLQNMGNTCYVNASLQ |
| Ubiquitin | | SRPDAAFAEIQRTSLPEKSPLS | | CLTYTPPLANYMLSREHSQT |
| carboxyl- | | CETRVDLCDDLAPVARQLAPRE | | CHRHKGCMLCTMQAHITRAL |
| terminal | | KLPLSSRRPAAVGAGLQNMGNT | | HNPGHVIQPSQALAAGFHRG |
| hydrolase 17- | | CYVNASLQCLTYTPPLANYMLS | | KQEDAHEFLMFTVDAMKKAC |
| like protein 19 | | REHSQTCHRHKGCMLCTMQAHI | | LPGHKQVDHHSKDTTLIHQI |
| | | TRALHNPGHVIQPSQALAAGFH | | FGGYWRSQIKCLHCHGISDT |
| | | RGKQEDAHEFLMFTVDAMKKAC | | FDPYLDIALDIQAAQSVQQA |
| | | LPGHKQVDHHSKDTTLIHQIFG | | LEQLVKPEELNGENAYHCGV |
| | | GYWRSQIKCLHCHGISDTFDPY | | CLQRAPASKTLTLHTSAKVL |
| | | LDIALDIQAAQSVQQALEQLVK | | ILVLKRFSDVTGNKIAKNVQ |
| | | PEELNGENAYHCGVCLQRAPAS | | YPECLDMQPYMSQTNTGPLV |
| | | KTLTLHTSAKVLILVLKRFSDV | | YVLYAVLVHAGWSCHNGHYF |
| | | TGNKIAKNVQYPEC | | SYVKAQEGQWYKMDDAEVTA |
| | | LDMQPYMSQTNTGPLVYVLYAV | | SSITSVLSQQAYVLFYIQKS |
| | | LVHAGWSCHNGHYFSYVKAQEG | | EWERHSESVSRGREPRALGA |
| | | QWYKMDDAEVTASSITSVLSQQ | | EDTDRRATQGELKRDHPCLQ |
| | | AYVLFYIQKSEWERHSESVSRG | | APEL |
| | | REPRALGAEDTDRRATQGELKR | | |
| | | DHPCLQAPELDEHLVERATQES | | |
| | | TLDHWKFLQEQNKTKPEFNVRK | | |
| | | VEGTLPPDVLVIHQSKYKCGMK | | |
| | | NHHPEQQSSLLKLSSTTPTHQE | | |
| | | SMNTGTLASLRGRARRSKGKNK | | |
| | | HSKRALLVCQ | | |
| U17LF_HUMAN | 41 | MEDDSLYLGGEWQFNHESKLTS | 153 | AVGAGLQNMGNTCYVNASLQ |
| Ubiquitin | | SRPDAAFAEIQRTSLPEKSPLS | | CLTYTPPLANYMLSREHSQT |
| carboxyl- | | CETRVDLCDDLAPVARQLAPRE | | CHRHKGCMLCTMQAHITRAL |
| terminal | | KLPLSSRRPAAVGAGLQNMGNT | | HNPGHVIQPSQALAAGFHRG |
| hydrolase 17- | | CYVNASLQCLTYTPPLANYMLS | | KQEDAHEFLMFTVDAMKKAC |
| like protein 15 | | REHSQTCHRHKGCMLCTMQAHI | | LPGHKQVDHHSKDTTLIHQI |
| | | TRALHNPGHVIQPSQALAAGFH | | FGGYWRSQIKCLHCHGISDT |
| | | RGKQEDAHEFLMFTVDAMKKAC | | FDPYLDIALDIQAAQSVQQA |
| | | LPGHKQVDHHSKDTTLIHQIFG | | LEQLVKPEELNGENAYHCGV |
| | | GYWRSQIKCLHCHGISDTEDPY | | CLQRAPASKTLTLHTSAKVL |
| | | LDIALDIQAAQSVQQALEQLVK | | ILVLKRFSDVTGNKIDKNVQ |
| | | PEELNGENAYHCGVCLQRAPAS | | YPECLDMKLYMSQTNSGPLV |
| | | KTLTLHTSAKVLILVLKRFSDV | | YVLYAVLVHAGWSCHNGHYF |
| | | TGNKIDKNVQYPEC | | SYVKAQEGQWYKMDDAEVTA |
| | | LDMKLYMSQTNSGPLVYVLYAV | | SSITSVLSQQAYVLFYIQKS |
| | | LVHAGWSCHNGHYFSYVKAQEG | | |
| | | QWYKMDDAEVTASSITSVLSQQ | | |
| | | AYVLFYIQKSEWERHSESVSRG | | |
| | | REPRALGAEDTDRRATQGELKR | | |
| | | DHPCLQAPELDEHLVERATQES | | |
| | | TLDHWKFLQEQNKTKPEFNVRK | | |
| | | VEGTLPPDVLVIHQSKYKCGMK | | |
| | | NHHPEQQSSLLNLSSTTPTHQE | | |
| | | SMNTGTLASLRGRARRSKGKNK | | |
| | | HSKRALLVCQWSQWKYRPTRRG | | |
| | | AHTHAHTQTHT | | |
| UBP47_HUMAN | 42 | MVPGEENQLVPKEDVEWRCRQN | 154 | ETGYVGLVNQAMTCYLNSLL |
| Ubiquitin | | IFDEMKKKFLQIENAAEEPRVL | | QTLEMTPEFRNALYKWEFEE |
| carboxyl- | | CIIQDTTNSKTVNERITLNLPA | | SEEDPVTSIPYQLQRLFVLL |
| terminal | | STPVRKLFEDVANKVGYINGTF | | QTSKKRAIETTDVTRSFGWD |
| hydrolase 47 | | DLVWGNGINTADMAPLDHTSDK | | SSEAWQQHDVQELCRVMEDA |
| | | SLLDANFEPGKKNFLHLTDKDG | | LEQKWKQTEQADLINELYQG |
| | | EQPQILLEDSSAGEDSVHDREI | | KLKDYVRCLECGYEGWRIDT |
| | | GPLPREGSGGSTSDYVSQSYSY | | YLDIPLVIRPYGSSQAFASV |
| | | SSILNKSETGYVGLVNQAMTCY | | EEALHAFIQPEILDGPNQYF |
| | | LNSLLQTLEMTPEFRNALYKWE | | CERCKKKCDARKGLRFLHFP |
| | | FEESEEDPVTSIPYQLQRLEVL | | YLLTLQLKRFDEDYTTMHRI |
| | | LQTSKKRAIETTDVTRSFGWDS | | KLNDRMTFPEELDMSTFIDV |
| | | SEAWQQHDVQELCRVMEDALEQ | | EDEKSPQTESCTDSGAENEG |
| | | KWKQTEQADLINEL | | SCHSDQMSNDESNDDGVDEG |
| | | YQGKLKDYVRCLECGYEGWRID | | ICLETNSGTEKISKSGLEKN |
| | | TYLDIPLVIRPYGSSQAFASVE | | SLIYELFSVMVHSGSAAGGH |
| | | EALHAFIQPEILDGPNQYFCER | | YYACIKSFSDEQWYSENDQH |
| | | CKKKCDARKGLRFLHFPYLLTL | | VSRITQEDIKKTHGGSSGSR |
| | | QLKRFDEDYTTMHRIKLNDRMT | | GYYSSAFASSTNAYMLIYRL |
| | | FPEELDMSTFIDVEDEKSPQTE | | KD |
| | | SCTDSGAENEGSCHSDQMSNDE | | |
| | | SNDDGVDEGICLETNSGTEKIS | | |
| | | KSGLEKNSLIYELFSVMVHSGS | | |
| | | AAGGHYYACIKSFSDEQWYSEN | | |
| | | DQHVSRITQEDIKKTHGGSSGS | | |
| | | RGYYSSAFASSTNAYMLIYRLK | | |
| | | DPARNAKFLEVDEYPEHIKNLV | | |
| | | QKERELEEQEKRQR | | |
| | | EIERNTCKIKLFCLHPTKQVMM | | |
| | | ENKLEVHKDKTLKEAVEMAYKM | | |
| | | MDLEEVIPLDCCRLVKYDEFHD | | |
| | | YLERSYEGEEDTPMGLLLGGVK | | |
| | | STYMEDLLLETRKPDQVFQSYK | | |
| | | PGEVMVKVHVVDLKAESVAAPI | | |
| | | TVRAYLNQTVTEFKQLISKAIH | | |
| | | LPAETMRIVLERCYNDLRLLSV | | |
| | | SSKTLKAEGFFRSNKVFVESSE | | |
| | | TLDYQMAFADSHLWKLLDRHAN | | |
| | | TIRLFVLLPEQSPVSYSKRTAY | | |
| | | QKAGGDSGNVDDDCERVKGPVG | | |
| | | SLKSVEAILEESTEKLKSLSLQ | | |
| | | QQQDGDNGDSSKST | | |
| | | ETSDFENIESPLNERDSSASVD | | |
| | | NRELEQHIQTSDPENFQSEERS | | |
| | | DSDVNNDRSTSSVDSDILSSSH | | |
| | | SSDTLCNADNAQIPLANGLDSH | | |
| | | SITSSRRTKANEGKKETWDTAE | | |
| | | EDSGTDSEYDESGKSRGEMQYM | | |
| | | YFKAEPYAADEGSGEGHKWLMV | | |
| | | HVDKRITLAAFKQHLEPFVGVL | | |
| | | SSHFKVERVYASNQEFESVRLN | | |
| | | ETLSSESDDNKITIRLGRALKK | | |
| | | GEYRVKVYQLLVNEQEPCKELL | | |
| | | DAVFAKGMTVRQSKEELIPQLR | | |
| | | EQCGLELSIDRERLRKKTWKNP | | |
| | | GTVFLDYHIYEEDI | | |
| | | NISSNWEVELEVLDGVEKMKSM | | |
| | | SQLAVLSRRWKPSEMKLDPEQE | | |
| | | VVLESSSVDELREKLSEISGIP | | |
| | | LDDIEFAKGRGTFPCDISVLDI | | |
| | | HQDLDWNPKVSTLNVWPLYICD | | |
| | | DGAVIFYRDKTEELMELTDEQR | | |
| | | NELMKKESSRLQKTGHRVTYSP | | |
| | | RKEKALKIYLDGAPNKDLTQD | | |
| UBP51_HUM | 43 | MAQVRETSLPSGSGVRWISGGG | 155 | YTVGLRGLINLGNTCEMNCI |
| AN Ubiquitin | | GGASPEEAVEKAGKMEEAAAGA | | VQALTHIPLLKDFFLSDKHK |
| carboxyl- | | TKASSRREAEEMKLEPLQEREP | | CIMTSPSLCLVCEMSSLFHA |
| terminal | | APEENLTWSSSGGDEKVLPSIP | | MYSGSRTPHIPYKLLHLIWI |
| hydrolase 51 | | LRCHSSSSPVCPRRKPRPRPQP | | HAEHLAGYRQQDAHEFLIAI |
| | | RARSRSQPGLSAPPPPPARPPP | | LDVLHRHSKDDSGGQEANNP |
| | | PPPPPPPPAPRPRAWRGSRRRS | | NCCNCIIDQIFTGGLQSDVT |
| | | RPGSRPQTRRSCSGDLDGSGDP | | CQACHSVSTTIDPCWDISLD |
| | | GGLGDWLLEVEFGQGPTGCSHV | | LPGSCATFDSQNPERADSTV |
| | | ESFKVGKNWQKNLRLIYQRFVW | | SRDDHIPGIPSLTDCLQWFT |
| | | SGTPETRKRKAKSCICHVCSTH | | RPEHLGSSAKIKCNSCQSYQ |
| | | MNRLHSCLSCVFFGCFTEKHIH | | ESTKQLTMKKLPIVACFHLK |
| | | KHAETKQHHLAVDLYHGVIYCF | | RFEHVGKQRRKINTFISFPL |
| | | MCKDYVYDKDIEQI | | ELDMTPFLASTKESRMKEGQ |
| | | AKETKEKILRLLTSTSTDVSHQ | | PPTDCVPNENKYSLFAVINH |
| | | QFMTSGFEDKQSTCETKEQEPK | | HGTLESGHYTSFIRQQKDQW |
| | | LVKPKKKRRKKSVYTVGLRGLI | | FSCDDAIITKATIEDLLYSE |
| | | NLGNTCFMNCIVQALTHIPLLK | | GYLLFYHKQG |
| | | DFFLSDKHKCIMTSPSLCLVCE | | |
| | | MSSLFHAMYSGSRTPHIPYKLL | | |
| | | HLIWIHAEHLAGYRQQDAHEFL | | |
| | | IAILDVLHRHSKDDSGGQEANN | | |
| | | PNCCNCIIDQIFTGGLQSDVTC | | |
| | | QACHSVSTTIDPCWDISLDLPG | | |
| | | SCATFDSQNPERADSTVSRDDH | | |
| | | IPGIPSLTDCLQWFTRPEHLGS | | |
| | | SAKIKCNSCQSYQESTKQLTMK | | |
| | | KLPIVACFHLKRFE | | |
| | | HVGKQRRKINTFISFPLELDMT | | |
| | | PFLASTKESRMKEGQPPTDCVP | | |
| | | NENKYSLFAVINHHGTLESGHY | | |
| | | TSFIRQQKDQWFSCDDAIITKA | | |
| | | TIEDLLYSEGYLLFYHKQGLEK | | |
| | | D | | |
| UBP36_HUMAN | 44 | MPIVDKLKEALKPGRKDSADDG | 156 | RVGAGLHNLGNTCFLNATIQ |
| Ubiquitin | | ELGKLLASSAKKVLLQKIEFEP | | CLTYTPPLANYLLSKEHARS |
| carboxyl- | | ASKSFSYQLEALKSKYVLLNPK | | CHQGSFCMLCVMQNHIVQAF |
| terminal | | TEGASRHKSGDDPPARRQGSEH | | ANSGNAIKPVSFIRDLKKIA |
| hydrolase 36 | | TYESCGDGVPAPQKVLFPTERL | | RHFREGNQEDAHEFLRYTID |
| | | SLRWERVERVGAGLHNLGNTCF | | AMQKACLNGCAKLDRQTQAT |
| | | LNATIQCLTYTPPLANYLLSKE | | TLVHQIFGGYLRSRVKCSVC |
| | | HARSCHQGSFCMLCVMQNHIVQ | | KSVSDTYDPYLDVALEIRQA |
| | | AFANSGNAIKPVSFIRDLKKIA | | ANIVRALELFVKADVLSGEN |
| | | RHFREGNQEDAHEFLRYTIDAM | | AYMCAKCKKKVPASKRFTIH |
| | | QKACLNGCAKLDRQTQATTLVH | | RTSNVLTLSLKRFANFSGGK |
| | | QIFGGYLRSRVKCSVCKSVSDT | | ITKDVGYPEFLNIRPYMSQN |
| | | YDPYLDVALEIRQAANIVRALE | | NG |
| | | LFVKADVLSGENAY | | DPVMYGLYAVLVHSGYSCHA |
| | | MCAKCKKKVPASKRFTIHRTSN | | GHYYCYVKASNGQWYQMNDS |
| | | VLTLSLKRFANFSGGKITKDVG | | LVHSSNVKVVLNQQAYVLFY |
| | | YPEFLNIRPYMSQNNGDPVMYG | | LRIP |
| | | LYAVLVHSGYSCHAGHYYCYVK | | |
| | | ASNGQWYQMNDSLVHSSNVKVV | | |
| | | LNQQAYVLFYLRIPGSKKSPEG | | |
| | | LISRTGSSSLPGRPSVIPDHSK | | |
| | | KNIGNGIISSPLTGKRQDSGTM | | |
| | | KKPHTTEEIGVPISRNGSTLGL | | |
| | | KSQNGCIPPKLPSGSPSPKLSQ | | |
| | | TPTHMPTILDDPGKKVKKPAPP | | |
| | | QHFSPRTAQGLPGTSNSNSSRS | | |
| | | GSQRQGSWDSRDVVLSTSPKLL | | |
| | | ATATANGHGLKGND | | |
| | | ESAGLDRRGSSSSSPEHSASSD | | |
| | | STKAPQTPRSGAAHLCDSQETN | | |
| | | CSTAGHSKTPPSGADSKTVKLK | | |
| | | SPVLSNTTTEPASTMSPPPAKK | | |
| | | LALSAKKASTLWRATGNDLRPP | | |
| | | PPSPSSDLTHPMKTSHPVVAST | | |
| | | WPVHRARAVSPAPQSSSRLQPP | | |
| | | FSPHPTLLSSTPKPPGTSEPRS | | |
| | | CSSISTALPQVNEDLVSLPHQL | | |
| | | PEASEPPQSPSEKRKKTEVGEP | | |
| | | QRLGSETRLPQHIREATAAPHG | | |
| | | KRKRKKKKRPEDTAASALQEGQ | | |
| | | TQRQPGSPMYRREGQAQLPAVR | | |
| | | RQEDGTQPQVNGQQ | | |
| | | VGCVTDGHHASSRKRRRKGAEG | | |
| | | LGEEGGLHQDPLRHSCSPMGDG | | |
| | | DPEAMEESPRKKKKKKRKQETQ | | |
| | | RAVEEDGHLKCPRSAKPQDAVV | | |
| | | PESSSCAPSANGWCPGDRMGLS | | |
| | | QAPPVSWNGERESDVVQELLKY | | |
| | | SSDKAYGRKVLTWDGKMSAVSQ | | |
| | | DAIEDSRQARTETVVDDWDEEF | | |
| | | DRGKEKKIKKFKREKRRNFNAF | | |
| | | QKLQTRRNEWSVTHPAKAASLS | | |
| | | YRR | | |
| UBP44_HUMAN | 45 | MLAMDTCKHVGQLQLAQDHSSL | 157 | TPGVTGLRNLGNTCYMNSVL |
| Ubiquitin | | NPQKWHCVDCNTTESIWACLSC | | QVLSHLLIFRQCFLKLDLNQ |
| carboxyl- | | SHVACGRYIEEHALKHFQESSH | | WLAMTASEKTRSCKHPPVTD |
| terminal | | PVALEVNEMYVFCYLCDDYVLN | | TVVYQMNECQEKDTGFVCSR |
| hydrolase 44 | | DNTTGDLKLLRRTLSAIKSQNY | | QSSLSSGLSGGASKGRKMEL |
| | | HCTTRSGRFLRSMGTGDDSYFL | | IQPKEPTSQYISLCHELHTL |
| | | HDGAQSLLQSEDQLYTALWHRR | | FQVMWSGKWALVSPFAMLHS |
| | | RILMGKIFRTWFEQSPIGRKKQ | | VWRLIPAFRGYAQQDAQEFL |
| | | EEPFQEKIVVKREVKKRRQELE | | CELLDKIQRELETTGTSLPA |
| | | YQVKAELESMPPRKSLRLQGLA | | LIPTSQRKLIKQVLNVVNNI |
| | | QSTIIEIVSVQVPAQTPASPAK | | FHGQLLSQVTCLACDNKSNT |
| | | DKVLSTSENEISQKVSDSSVKR | | IEPFWDLSLEFPERYQCSGK |
| | | RPIVTPGVTGLRNLGNTCYMNS | | DIASQPCLVTEMLAKFTETE |
| | | VLQVLSHLLIFRQC | | ALEGKIYVCDQCNSKRRRES |
| | | FLKLDLNQWLAMTASEKTRSCK | | SKPVVLTEAQKQLMICHLPQ |
| | | HPPVTDTVVYQMNECQEKDTGF | | VLRLHLKRFRWSGRNNREKI |
| | | VCSRQSSLSSGLSGGASKGRKM | | GVHVGFEEILNMEPYCCRET |
| | | ELIQPKEPTSQYISLCHELHTL | | LKSLRPECFIYDLSAVVMHH |
| | | FQVMWSGKWALVSPFAMLHSVW | | GKGFGSGHYTAYCYNSEGGE |
| | | RLIPAFRGYAQQDAQEFLCELL | | WVHCNDSKLSMCTMDEVCKA |
| | | DKIQRELETTGTSLPALIPTSQ | | QAYILFYTQRV |
| | | RKLIKQVLNVVNNIFHGQLLSQ | | |
| | | VTCLACDNKSNTIEPFWDLSLE | | |
| | | FPERYQCSGKDIASQPCLVTEM | | |
| | | LAKFTETEALEGKIYVCDQCNS | | |
| | | KRRRFSSKPVVLTEAQKQLMIC | | |
| | | HLPQVLRLHLKRFRWSGRNNRE | | |
| | | KIGVHVGFEEILNM | | |
| | | EPYCCRETLKSLRPECFIYDLS | | |
| | | AVVMHHGKGFGSGHYTAYCYNS | | |
| | | EGGFWVHCNDSKLSMCTMDEVC | | |
| | | KAQAYILFYTQRVTENGHSKLL | | |
| | | PPELLLGSQHPNEDADTSSNEI | | |
| | | LS | | |
| UBP8_HUMAN | 46 | MPAVASVPKELYLSSSLKDLNK | 158 | PALTGLRNLGNTCYMNSILQ |
| Ubiquitin | | KTEVKPEKISTKSYVHSALKIF | | CLCNAPHLADYENRNCYQDD |
| carboxyl- | | KTAEECRLDRDEERAYVLYMKY | | INRSNLLGHKGEVAEEFGII |
| terminal | | VTVYNLIKKRPDFKQQQDYFHS | | MKALWTGQYRYISPKDFKIT |
| hydrolase 8 | | ILGPGNIKKAVEEAERLSESLK | | IGKINDQFAGYSQQDSQELL |
| | | LRYEEAEVRKKLEEKDRQEEAQ | | LFLMDGLHEDLNKADNRKRY |
| | | RLQQKRQETGREDGGTLAKGSL | | KEENNDHLDDFKAAEHAWQK |
| | | ENVLDSKDKTQKSNGEKNEKCE | | HKQLNESIIVALFQGQFKST |
| | | TKEKGAITAKELYTMMTDKNIS | | VQCLTCHKKSRTFEAFMYLS |
| | | LIIMDARRMQDYQDSCILHSLS | | LPLASTSKCTLQDCLRLESK |
| | | VPEEAISPGVTASWIEAHLPDD | | EEKLTDNNRFYCSHCRARRD |
| | | SKDTWKKRGNVEYVVLLDWESS | | SLKKIEIWKLPPVLLVHLKR |
| | | AKDLQIGTTLRSLKDALFKWES | | FSYDGRWKQKLQTSVDEPLE |
| | | KTVLRNEPLVLEGG | | NLDLSQYVIGPKNNLKKYNL |
| | | YENWLLCYPQYTTNAKVTPPPR | | FSVSNHYGGLDGGHYTAYCK |
| | | RQNEEVSISLDFTYPSLEESIP | | NAARQRWFKEDDHEVSDISV |
| | | SKPAAQTPPASIEVDENIELIS | | SSVKSSAAYILFYTSLG |
| | | GQNERMGPLNISTPVEPVAASK | | |
| | | SDVSPIIQPVPSIKNVPQIDRT | | |
| | | KKPAVKLPEEHRIKSESTNHEQ | | |
| | | QSPQSGKVIPDRSTKPVVESPT | | |
| | | LMLTDEEKARIHAETALLMEKN | | |
| | | KQEKELRERQQEEQKEKLRKEE | | |
| | | QEQKAKKKQEAEENEITEKQQK | | |
| | | AKEEMEKKESEQAKKEDKETSA | | |
| | | KRGKEITGVKRQSKSEHETSDA | | |
| | | KKSVEDRGKRCPTPEIQKKSTG | | |
| | | DVPHTSVTGDSGSG | | |
| | | KPFKIKGQPESGILRTGTFRED | | |
| | | TDDTERNKAQREPLTRARSEEM | | |
| | | GRIVPGLPSGWAKFLDPITGTF | | |
| | | RYYHSPTNTVHMYPPEMAPSSA | | |
| | | PPSTPPTHKAKPQIPAERDREP | | |
| | | SKLKRSYSSPDITQAIQEEEKR | | |
| | | KPTVTPTVNRENKPTCYPKAEI | | |
| | | SRLSASQIRNLNPVFGGSGPAL | | |
| | | TGLRNLGNTCYMNSILQCLCNA | | |
| | | PHLADYFNRNCYQDDINRSNLL | | |
| | | GHKGEVAEEFGIIMKALWTGQY | | |
| | | RYISPKDFKITIGKINDQFAGY | | |
| | | SQQDSQELLLFLMDGLHEDLNK | | |
| | | ADNRKRYKEENNDH | | |
| | | LDDFKAAEHAWQKHKQLNESII | | |
| | | VALFQGQFKSTVQCLTCHKKSR | | |
| | | TFEAFMYLSLPLASTSKCTLQD | | |
| | | CLRLFSKEEKLTDNNRFYCSHC | | |
| | | RARRDSLKKIEIWKLPPVLLVH | | |
| | | LKRFSYDGRWKQKLQTSVDFPL | | |
| | | ENLDLSQYVIGPKNNLKKYNLF | | |
| | | SVSNHYGGLDGGHYTAYCKNAA | | |
| | | RQRWFKEDDHEVSDISVSSVKS | | |
| | | SAAYILFYTSLGPRVTDVAT | | |
| UBP37_HUMAN | 47 | MSPLKIHGPIRIRSMQTGITKW | 159 | QQLQGFSNLGNTCYMNAILQ |
| Ubiquitin | | KEGSFEIVEKENKVSLVVHYNT | | SLFSLQSFANDLLKQGIPWK |
| carboxyl- | | GGIPRIFQLSHNIKNVVLRPSG | | KIPLNALIRRFAHLLVKKDI |
| terminal | | AKQSRLMLTLQDNSFLSIDKVP | | CNSETKKDLLKKVKNAISAT |
| hydrolase 37 | | SKDAEEMRLELDAVHQNRLPAA | | AERESGYMQNDAHEFLSQCL |
| | | MKPSQGSGSFGAILGSRTSQKE | | DQLKEDMEKLNKTWKTEPVS |
| | | TSRQLSYSDNQASAKRGSLETK | | GEENSPDISATRAYTCPVIT |
| | | DDIPFRKVLGNPGRGSIKTVAG | | NLEFEVQHSIICKACGEIIP |
| | | SGIARTIPSLTSTSTPLRSGLL | | KREQFNDLSIDLPRRKKPLP |
| | | ENRTEKRKRMISTGSELNEDYP | | PRSIQDSLDLFFRAEELEYS |
| | | KENDSSSNNKAMTDPSRKYLTS | | CEKCGGKCALVRHKENRLPR |
| | | SREKQLSLKQSEENRTSGLLPL | | VLILHLKRYSENVALSLNNK |
| | | QSSSFYGSRAGSKEHSSGGTNL | | IGQQVIIPRYLTLSSHCTEN |
| | | DRTNVSSQTPSAKR | | TKP |
| | | SLGFLPQPVPLSVKKLRCNQDY | | PFTLGWSAHMAISRPLKASQ |
| | | TGWNKPRVPLSSHQQQQLQGES | | MVNSCITSPSTPSKKFTEKS |
| | | NLGNTCYMNAILQSLFSLQSFA | | KSSLALCLDSDSEDELKRSV |
| | | NDLLKQGIPWKKIPLNALIRRF | | ALSQRLCEMLGNEQQQEDLE |
| | | AHLLVKKDICNSETKKDLLKKV | | KDSKLCPIEPDKSELENSGF |
| | | KNAISATAERFSGYMQNDAHEF | | DRMSEEELLAAVLEISKRDA |
| | | LSQCLDQLKEDMEKLNKTWKTE | | SPSLSHEDDDKPTSSPDTGF |
| | | PVSGEENSPDISATRAYTCPVI | | AEDDIQEMPENPDTMETEKP |
| | | TNLEFEVQHSIICKACGEIIPK | | KTITELDPASFTEITKDCDE |
| | | REQENDLSIDLPRRKKPLPPRS | | NKENKTPEGSQGEVDWLQQY |
| | | IQDSLDLFFRAEELEYSCEKCG | | DMEREREEQELQQALAQSLQ |
| | | GKCALVRHKENRLPRVLILHLK | | EQEAWEQKEDDDLKRATELS |
| | | RYSENVALSLNNKIGQQVIIPR | | LQEFNNSFVDALGSDEDSGN |
| | | YLTLSSHCTENTKP | | EDVEDMEYTEAEAEELKRNA |
| | | PFTLGWSAHMAISRPLKASQMV | | ETGNLPHSYRLISVVSHIGS |
| | | NSCITSPSTPSKKFTFKSKSSL | | TSSSGHYISDVYDIKKQAWF |
| | | ALCLDSDSEDELKRSVALSQRL | | TYNDLEVSKIQEAAVQSDRD |
| | | CEMLGNEQQQEDLEKDSKLCPI | | RSGYIFFYMHK |
| | | EPDKSELENSGEDRMSEEELLA | | |
| | | AVLEISKRDASPSLSHEDDDKP | | |
| | | TSSPDTGFAEDDIQEMPENPDT | | |
| | | METEKPKTITELDPASFTEITK | | |
| | | DCDENKENKTPEGSQGEVDWLQ | | |
| | | QYDMEREREEQELQQALAQSLQ | | |
| | | EQEAWEQKEDDDLKRATELSLQ | | |
| | | EFNNSFVDALGSDEDSGNEDVE | | |
| | | DMEYTEAEAEELKRNAETGNLP | | |
| | | HSYRLISVVSHIGS | | |
| | | TSSSGHYISDVYDIKKQAWFTY | | |
| | | NDLEVSKIQEAAVQSDRDRSGY | | |
| | | IFFYMHKEIFDELLETEKNSQS | | |
| | | LSTEVGKTTRQAL | | |
| U17LD_HUMAN | 48 | MEEDSLYLGGEWQFNHESKLTS | 160 | AVGAGLQNMGNTCYVNASLQ |
| Ubiquitin | | SRLDAAFAEIQRTSLPEKSPLS | | CLTYTPPLANYMLSREHSQT |
| carboxyl- | | CETRVDLCDDLVPEARQLAPRE | | CHRHKGCMLCTMQAHITRAL |
| terminal | | KLPLSSRRPAAVGAGLQNMGNT | | HNPGHVIQPSQALAAGFHRG |
| hydrolase 17- | | CYVNASLQCLTYTPPLANYMLS | | KQEDAHEFLMFTVDAMKKAC |
| like protein 13 | | REHSQTCHRHKGCMLCTMQAHI | | LPGHKQVDHPSKDTTLIHQI |
| | | TRALHNPGHVIQPSQALAAGFH | | FGGYWRSQIKCLHCHGISDT |
| | | RGKQEDAHEFLMFTVDAMKKAC | | FDPYLDIALDIQAAQSVQQA |
| | | LPGHKQVDHPSKDTTLIHQIFG | | LEQLVKPEELNGENAYHCGV |
| | | GYWRSQIKCLHCHGISDTEDPY | | CLQRAPASKTLTLHTSAKVL |
| | | LDIALDIQAAQSVQQALEQLVK | | ILVLKRFSDVTGNKIAKNVQ |
| | | PEELNGENAYHCGVCLQRAPAS | | YPECLDMQPYMSQQNTGPLV |
| | | KTLTLHTSAKVLILVLKRFSDV | | YVLYAVLVHAGWSCHNGHYF |
| | | TGNKIAKNVQYPEC | | SYVKAQEGQWYKMDDAEVTA |
| | | LDMQPYMSQQNTGPLVYVLYAV | | ASITSVLSQQAYVLFYIQKS |
| | | LVHAGWSCHNGHYFSYVKAQEG | | |
| | | QWYKMDDAEVTAASITSVLSQQ | | |
| | | AYVLFYIQKSEWERHSESVSRG | | |
| | | REPRALGAEDTDRRATQGELKR | | |
| | | DHPCLQAPELDEHLVERATQES | | |
| | | TLDRWKFLQEQNKTKPEFNVRK | | |
| | | VEGTLPPDVLVIHQSKYKCGMK | | |
| | | NHHPEQQSSLLNLSSSTPTHQE | | |
| | | SMNTGTLASLRGRARRSKGKNK | | |
| | | HSKRALLVCQ | | |
| U17L3_HUMAN | 49 | MGDDSLYLGGEWQFNHESKLTS | 161 | AVGAGLQNMGNTCYENASLQ |
| Ubiquitin | | SRPDAAFAEIQRTSLPEKSPLS | | CLTYTLPLANYMLSREHSQT |
| carboxyl- | | SETRVDLCDDLAPVARQLAPRE | | CQRPKCCMLCTMQAHITWAL |
| terminal | | KLPLSSRRPAAVGAGLQNMGNT | | HSPGHVIQPSQALASGFHRG |
| hydrolase 17- | | CYENASLQCLTYTLPLANYMLS | | KQEDVHEFLMFTVDAMKKAC |
| like protein 3 | | REHSQTCQRPKCCMLCTMQAHI | | LPGHKQVDHHSKDTTLIHQI |
| | | TWALHSPGHVIQPSQALASGEH | | FGGCWRSQIKCLHCHGISDT |
| | | RGKQEDVHEFLMFTVDAMKKAC | | FDPYLDIALDIQAAQSVKQA |
| | | LPGHKQVDHHSKDTTLIHQIFG | | LEQLVKPEELNGENAYHCGL |
| | | GCWRSQIKCLHCHGISDTEDPY | | CLQRAPASNTLTLHTSAKVL |
| | | LDIALDIQAAQSVKQALEQLVK | | ILVLKRFSDVAGNKLAKNVQ |
| | | PEELNGENAYHCGLCLQRAPAS | | YPECLDMQPYMSQQNTGPLV |
| | | NTLTLHTSAKVLILVLKRESDV | | YVLYAVLVHAGWSCHDGHYF |
| | | AGNKLAKNVQYPEC | | SYVKAQEGQWYKMDDAEVTV |
| | | LDMQPYMSQQNTGPLVYVLYAV | | CSITSVLSQQAYVLFYIQKS |
| | | LVHAGWSCHDGHYFSYVKAQEG | | |
| | | QWYKMDDAEVTVCSITSVLSQQ | | |
| | | AYVLFYIQKSEWERHSESVSRG | | |
| | | REPRALGAEDTDRRAKQGELKR | | |
| | | DHPCLQAPELDEHLVERATQES | | |
| | | TLDHWKFLQEQNKTKPEFNVGK | | |
| | | VEGTLPPNALVIHQSKYKCGMK | | |
| | | NHHPEQQSSLLNLSSTTRTDQE | | |
| | | SMNTGTLASLQGRTRRAKGKNK | | |
| | | HSKRALLVCQ | | |
| UBP54_HUMAN | 50 | MSWKRNYFSGGRGSVQGMFAPR | 162 | APSKGLSNEPGQNSCFLNSA |
| Inactive | | SSTSIAPSKGLSNEPGQNSCEL | | LQVLWHLDIFRRSFRQLTTH |
| ubiquitin | | NSALQVLWHLDIFRRSFRQLTT | | KCMGDSCIFCALKGIFNQFQ |
| carboxyl- | | HKCMGDSCIFCALKGIFNQFQC | | CSSEKVLPSDTLRSALAKTE |
| terminal | | SSEKVLPSDTLRSALAKTFQDE | | QDEQRFQLGIMDDAAECFEN |
| hydrolase 54 | | QRFQLGIMDDAAECFENLLMRI | | LLMRIHFHIADETKEDICTA |
| | | HFHIADETKEDICTAQHCISHQ | | QHCISHQKFAMTLFEQCVCT |
| | | KFAMTLFEQCVCTSCGATSDPL | | SCGATSDPLPFIQ |
| | | PFIQMVHYISTTSLCNQAICML | | MVHYISTTSLCNQAICMLER |
| | | ERREKPSPSMFGELLQNASTMG | | REKPSPSMFGELLQNASTMG |
| | | DLRNCPSNCGERIRIRRVLMNA | | DLRNCPSNCGERIRIRRVLM |
| | | PQIITIGLVWDSDHSDLAEDVI | | NAPQIITIGLVWDSDHSDLA |
| | | HSLGTCLKLGDLFFRVTDDRAK | | EDVIHSLGTCLKLGDLFFRV |
| | | QSELYLVGMICYYG | | TDDRAKQSELYLVGMICYYG |
| | | KHYSTFFFQTKIRKWMYEDDAH | | KHYSTFFFQTKIRKWMYFDD |
| | | VKEIGPKWKDVVTKCIKGHYQP | | AHVKEIGPKWKDVVTKCIKG |
| | | LLLLYADPQGTPVSTQDLPPQA | | HYQPLLLLYADPQGTPVSTQ |
| | | EFQSYSRTCYDSEDSGREPSIS | | DLPPQAEFQSYSRTCYDSED |
| | | SDTRTDSSTESYPYKHSHHESV | | SGREPSISSDTRTDSSTESY |
| | | VSHFSSDSQGTVIYNVENDSMS | | PYKHSHHESVVSHESSDSQG |
| | | QSSRDTGHLTDSECNQKHTSKK | | TVIYNVEND |
| | | GSLIERKRSSGRVRRKGDEPQA | | |
| | | SGYHSEGETLKEKQAPRNASKP | | |
| | | SSSTNRLRDFKETVSNMIHNRP | | |
| | | SLASQTNVGSHCRGRGGDQPDK | | |
| | | KPPRTLPLHSRDWEIESTSSES | | |
| | | KSSSSSKYRPTWRPKRESLNID | | |
| | | SIFSKDKRKHCGYT | | |
| | | QLSPFSEDSAKEFIPDEPSKPP | | |
| | | SYDIKFGGPSPQYKRWGPARPG | | |
| | | SHLLEQHPRLIQRMESGYESSE | | |
| | | RNSSSPVSLDAALPESSNVYRD | | |
| | | PSAKRSAGLVPSWRHIPKSHSS | | |
| | | SILEVDSTASMGGWTKSQPFSG | | |
| | | EEISSKSELDELQEEVARRAQE | | |
| | | QELRRKREKELEAAKGENPHPS | | |
| | | RFMDLDELQNQGRSDGFERSLQ | | |
| | | EAESVFEESLHLEQKGDCAAAL | | |
| | | ALCNEAISKLRLALHGASCSTH | | |
| | | SRALVDKKLQISIRKARSLQDR | | |
| | | MQQQQSPQQPSQPSACLPTQAG | | |
| | | TLSQPTSEQPIPLQ | | |
| | | VLLSQEAQLESGMDTEFGASSE | | |
| | | FHSPASCHESHSSLSPESSAPQ | | |
| | | HSSPSRSALKLLTSVEVDNIEP | | |
| | | SAFHRQGLPKAPGWTEKNSHHS | | |
| | | WEPLDAPEGKLQGSRCDNSSCS | | |
| | | KLPPQEGRGIAQEQLFQEKKDP | | |
| | | ANPSPVMPGIATSERGDEHSLG | | |
| | | CSPSNSSAQPSLPLYRTCHPIM | | |
| | | PVASSFVLHCPDPVQKTNQCLQ | | |
| | | GQSLKTSLTLKVDRGSEETYRP | | |
| | | EFPSTKGLVRSLAEQFQRMQGV | | |
| | | SMRDSTGFKDRSLSGSLRKNSS | | |
| | | PSDSKPPFSQGQEKGHWPWAKQ | | |
| | | QSSLEGGDRPLSWE | | |
| | | ESTEHSSLALNSGLPNGETSSG | | |
| | | GQPRLAEPDIYQEKLSQVRDVR | | |
| | | SKDLGSSTDLGTSLPLDSWVNI | | |
| | | TRFCDSQLKHGAPRPGMKSSPH | | |
| | | DSHTCVTYPERNHILLHPHWNQ | | |
| | | DTEQETSELESLYQASLQASQA | | |
| | | GCSGWGQQDTAWHPLSQTGSAD | | |
| | | GMGRRLHSAHDPGLSKTSTAEM | | |
| | | EHGLHEARTVRTSQATPCRGLS | | |
| | | RECGEDEQYSAENLRRISRSLS | | |
| | | GTVVSEREEAPVSSHSFDSSNV | | |
| | | RKPLETGHRCSSSSSLPVIHDP | | |
| | | SVELLGPQLYLPQPQFLSPDVL | | |
| | | MPTMAGEPNRLPGT | | |
| | | SRSVQQFLAMCDRGETSQGAKY | | |
| | | TGRTLNYQSLPHRSRTDNSWAP | | |
| | | WSETNQHIGTRFLTTPGCNPQL | | |
| | | TYTATLPERSKGLQVPHTQSWS | | |
| | | DLFHSPSHPPIVHPVYPPSSSL | | |
| | | HVPLRSAWNSDPVPGSRTPGPR | | |
| | | RVDMPPDDDWRQSSYASHSGHR | | |
| | | RTVGEGFLFVLSDAPRREQIRA | | |
| | | RVLQHSQW | | |
| SNUT2_HUMAN | 51 | MSGRSKRESRGSTRGKRESESR | 163 | LPGIVGLNNIKANDYANAVL |
| U4/U6.U5 | | GSSGRVKRERDREREPEAASSR | | QALSNVPPLRNYFLEEDNYK |
| tri-snRNP- | | GSPVRVKREFEPASAREAPASV | | NIKRPPGDIMELLVQREGEL |
| associated | | VPFVRVKREREVDEDSEPEREV | | MRKLWNPRNFKAHVSPHEML |
| protein 2 | | RAKNGRVDSEDRRSRHCPYLDT | | QAVVLCSKKTFQITKQGDGV |
| | | INRSVLDEDFEKLCSISLSHIN | | DFLSWFLNALHSALGGTKKK |
| | | AYACLVCGKYFQGRGLKSHAYI | | KKTIVTDVFQGSMRIFTKKL |
| | | HSVQFSHHVELNLHTLKFYCLP | | PHPDLPAEEKEQLLHNDEYQ |
| | | DNYEIIDSSLEDITYVLKPTFT | | ETMVESTFMYLTLDLPTAPL |
| | | KQQIANLDKQAKLSRAYDGTTY | | YKDEKEQLIIPQVPLENILA |
| | | LPGIVGLNNIKANDYANAVLQA | | KFNGITEKEYKTYKENFLKR |
| | | LSNVPPLRNYFLEEDNYKNIKR | | FQLTKLPPYLIFCIKRFTKN |
| | | PPGDIMFLLVQRFGELMRKLWN | | NFFVEKNPTIVNFPITNVDL |
| | | PRNFKAHVSPHEML | | REYLSEEVQAVHKNTTYDLI |
| | | QAVVLCSKKTFQITKQGDGVDE | | ANIVHDGKPSEGSYRIHVLH |
| | | LSWFLNALHSALGGTKKKKKTI | | HGTGKWYELQDLQVTDILPQ |
| | | VTDVFQGSMRIFTKKLPHPDLP | | MITLSEAYIQIWKRRD |
| | | AEEKEQLLHNDEYQETMVESTE | | |
| | | MYLTLDLPTAPLYKDEKEQLII | | |
| | | PQVPLENILAKENGITEKEYKT | | |
| | | YKENFLKRFQLTKLPPYLIFCI | | |
| | | KRFTKNNFFVEKNPTIVNFPIT | | |
| | | NVDLREYLSEEVQAVHKNTTYD | | |
| | | LIANIVHDGKPSEGSYRIHVLH | | |
| | | HGTGKWYELQDLQVTDILPQMI | | |
| | | TLSEAYIQIWKRRDNDETNQQG | | |
| | | A | | |
| UBP35_HUMAN | 52 | MDKILEAVVTSSYPVSVKQGLV | 164 | SDTGKIGLINLGNTCYVNSI |
| Ubiquitin | | RRVLEAARQPLEREQCLALLAL | | LQALFMASDERHCVLRLTEN |
| carboxyl- | | GARLYVGGAEELPRRVGCQLLH | | NSQPLMTKLQWLFGFLEHSQ |
| terminal | | VAGRHHPDVFAEFFSARRVLRL | | RPAISPENELSASWTPWESP |
| hydrolase 35 | | LQGGAGPPGPRALACVQLGLQL | | GTQQDCSEYLKYLLDRLHEE |
| | | LPEGPAADEVFALLRREVLRTV | | EKTGTRICQKLKQSSSPSPP |
| | | CERPGPAACAQVARLLARHPRC | | EEPPAPSSTSVEKMFGGKIV |
| | | VPDGPHRLLFCQQLVRCLGRER | | TRICCLCCLNVSSREEAFTD |
| | | CPAEGEEGAVEFLEQAQQVSGL | | LSLAFPPPERCRRRRLGSVM |
| | | LAQLWRAQPAAILPCLKELFAV | | RPTEDITARELPPPTSAQGP |
| | | ISCAEEEPPSSALASVVQHLPL | | GRVGPRRQRKHCITEDTPPT |
| | | ELMDGVVRNLSNDDSVTDSQML | | SLYIEGLDSKEAGGQSSQEE |
| | | TAISRMIDWVSWPLGKNIDKWI | | RIEREEEGKEERTEKEEVGE |
| | | IALLKGLAAVKKES | | EEESTRGEGEREKEEEVEEE |
| | | ILIEVSLTKIEKVESKLLYPIV | | EEKVE |
| | | RGAALSVLKYMLLTFQHSHEAF | | KETEKEAEQEKEEDSLGAGT |
| | | HLLLPHIPPMVASLVKEDSNSG | | HPDAAIPSGERTCGSEGSRS |
| | | TSCLEQLAELVHCMVFRFPGEP | | VLDLVNYFLSPEKLTAENRY |
| | | DLYEPVMEAIKDLHVPNEDRIK | | YCESCASLQDAEKVVELSQG |
| | | QLLGQDAWTSQKSELAGFYPRL | | PCYLILTLLRESFDLRTMRR |
| | | MAKSDTGKIGLINLGNTCYVNS | | RKILDDVSIPLLLRLPLAGG |
| | | ILQALFMASDERHCVLRLTENN | | RGQAYDLCSVVVHSGVSSES |
| | | SQPLMTKLQWLFGFLEHSQRPA | | GHYYCYAREGAARPAASLGT |
| | | ISPENFLSASWTPWFSPGTQQD | | ADRPEPENQWYLENDTRVSF |
| | | CSEYLKYLLDRLHEEEKTGTRI | | SSFESVSNVTSFFPKDTAYV |
| | | CQKLKQSSSPSPPEEPPAPSST | | LFYRQRP |
| | | SVEKMEGGKIVTRICCLCCLNV | | |
| | | SSREEAFTDLSLAF | | |
| | | PPPERCRRRRLGSVMRPTEDIT | | |
| | | ARELPPPTSAQGPGRVGPRRQR | | |
| | | KHCITEDTPPTSLYIEGLDSKE | | |
| | | AGGQSSQEERIEREEEGKEERT | | |
| | | EKEEVGEEEESTRGEGEREKEE | | |
| | | EVEEEEEKVEKETEKEAEQEKE | | |
| | | EDSLGAGTHPDAAIPSGERTCG | | |
| | | SEGSRSVLDLVNYFLSPEKLTA | | |
| | | ENRYYCESCASLQDAEKVVELS | | |
| | | QGPCYLILTLLRFSEDLRTMRR | | |
| | | RKILDDVSIPLLLRLPLAGGRG | | |
| | | QAYDLCSVVVHSGVSSESGHYY | | |
| | | CYAREGAARPAASLGTADRPEP | | |
| | | ENQWYLENDTRVSE | | |
| | | SSFESVSNVTSFFPKDTAYVLE | | |
| | | YRQRPREGPEAELGSSRVRTEP | | |
| | | TLHKDLMEAISKDNILYLQEQE | | |
| | | KEARSRAAYISALPTSPHWGRG | | |
| | | FDEDKDEDEGSPGGCNPAGGNG | | |
| | | GDFHRLVE | | |
| UBP15_HUMAN | 53 | MAEGGAADLDTQRSDIATLLKT | 165 | EQPGLCGLSNLGNTCFMNSA |
| Ubiquitin | | SLRKGDTWYLVDSRWFKQWKKY | | IQCLSNTPPLTEYFLNDKYQ |
| carboxyl- | | VGFDSWDKYQMGDQNVYPGPID | | EELNFDNPLGMRGEIAKSYA |
| terminal | | NSGLLKDGDAQSLKEHLIDELD | | ELIKQMWSGKFSYVTPRAFK |
| hydrolase 15 | | YILLPTEGWNKLVSWYTLMEGQ | | TQVGRFAPQFSGYQQQDCQE |
| | | EPIARKVVEQGMFVKHCKVEVY | | LLAFLLDGLHEDLNRIRKKP |
| | | LTELKLCENGNMNNVVTRRESK | | YIQLKDADGRPDKVVAEEAW |
| | | ADTIDTIEKEIRKIFSIPDEKE | | ENHLKRNDSIIVDIFHGLFK |
| | | TRLWNKYMSNTFEPLNKPDSTI | | STLVCPECAKISVTEDPFCY |
| | | QDAGLYQGQVLVIEQKNEDGTW | | LTLPLPMKKERTLEVYLVRM |
| | | PRGPSTPKSPGASNESTLPKIS | | DPLTKPMQYKVVVPKIGNIL |
| | | PSSLSNNYNNMNNRNVKNSNYC | | DLCTALSALSGIPADKMIVT |
| | | LPSYTAYKNYDYSEPGRNNEQP | | DIYNHRFHRIFAMDENLSSI |
| | | GLCGLSNLGNTCEM | | MERDDIYVFEININRTEDTE |
| | | NSAIQCLSNTPPLTEYFLNDKY | | HVIIPVCLREKFRHSSYTHH |
| | | QEELNFDNPLGMRGEIAKSYAE | | TGSSLFGQPFLMAVPRNNTE |
| | | LIKQMWSGKFSYVTPRAFKTQV | | DKLYNLLLLRMCRYVKISTE |
| | | GRFAPQFSGYQQQDCQELLAFL | | TEETEGSLHCCKDQNINGNG |
| | | LDGLHEDLNRIRKKPYIQLKDA | | PNGIHEEGSPSEMETDEPDD |
| | | DGRPDKVVAEEAWENHLKRNDS | | ESSQDQELPSENENSQSEDS |
| | | IIVDIFHGLFKSTLVCPECAKI | | VGGDNDSENGLCTEDTCKGQ |
| | | SVTFDPFCYLTLPLPMKKERTL | | LTGHKKRLFTFQFNNLGNTD |
| | | EVYLVRMDPLTKPMQYKVVVPK | | INYIKDDTRHIREDDRQLRL |
| | | IGNILDLCTALSALSGIPADKM | | DERSFLALDWDPDLKKRYED |
| | | IVTDIYNHRFHRIFAMDENLSS | | ENAAEDFEKHESVEYKPPKK |
| | | IMERDDIYVFEININRTEDTEH | | PFVKLKDCIELFTTKEKLGA |
| | | VIIPVCLREKFRHSSYTHHTGS | | EDPWYCPNCKEHQQATKKLD |
| | | SLFGQPFLMAVPRN | | LWSLPPVLVVHLKRESYSRY |
| | | NTEDKLYNLLLLRMCRYVKIST | | MRDKLDTLVDFPINDLDMSE |
| | | ETEETEGSLHCCKDQNINGNGP | | FLINPNAGPCRYNLIAVSNH |
| | | NGIHEEGSPSEMETDEPDDESS | | YGGMGGGHYTAFAKNKDDGK |
| | | QDQELPSENENSQSEDSVGGDN | | WYYFDDSSVSTASEDQIVSK |
| | | DSENGLCTEDTCKGQLTGHKKR | | AAYVLFYQRQD |
| | | LFTFQENNLGNTDINYIKDDTR | | |
| | | HIREDDRQLRLDERSFLALDWD | | |
| | | PDLKKRYFDENAAEDFEKHESV | | |
| | | EYKPPKKPFVKLKDCIELFTTK | | |
| | | EKLGAEDPWYCPNCKEHQQATK | | |
| | | KLDLWSLPPVLVVHLKRESYSR | | |
| | | YMRDKLDTLVDFPINDLDMSEF | | |
| | | LINPNAGPCRYNLIAVSNHYGG | | |
| | | MGGGHYTAFAKNKD | | |
| | | DGKWYYFDDSSVSTASEDQIVS | | |
| | | KAAYVLFYQRQDTESGTGFFPL | | |
| | | DRETKGASAATGIPLESDEDSN | | |
| | | DNDNDIENENCMHTN | | |
| UBP29_HUMAN | 54 | MISLKVCGFIQIWSQKTGMTKL | 166 | QLQQGFPNLGNTCYMNAVLQ |
| Ubiquitin | | KEALIETVQRQKEIKLVVTEKS | | SLFAIPSFADDLLTQGVPWE |
| carboxyl- | | GKFIRIFQLSNNIRSVVLRHCK | | YIPFEALIMTLTQLLALKDE |
| terminal | | KRQSHLRLTLKNNVELFIDKLS | | CSTKIKRELLGNVKKVISAV |
| hydrolase 29 | | YRDAKQLNMELDIIHQNKSQQP | | AEIFSGNMQNDAHEFLGQCL |
| | | MKSDDDWSVFESRNMLKEIDKT | | DQLKEDMEKLNATLNTGKEC |
| | | SFYSICNKPSYQKMPLFMSKSP | | GDENSSPQMHVGSAATKVEV |
| | | THVKKGILENQGGKGQNTLSSD | | CPVVANFEFELQLSLICKAC |
| | | VQTNEDILKEDNPVPNKKYKTD | | GHAVLKVEPNNYLSINLHQE |
| | | SLKYIQSNRKNPSSLEDLEKDR | | TKPLPLSIQNSLDLFFKEEE |
| | | DLKLGPSENTNCNGNPNLDETV | | LEYNCQMCKQKSCVARHTES |
| | | LATQTLNAKNGLTSPLEPEHSQ | | RLSRVLIIHLKRYSENNAWL |
| | | GDPRCNKAQVPLDSHSQQLQQG | | LVKNNEQVYIPKSLSLSSYC |
| | | FPNLGNTCYMNAVL | | NESTKPPLPLSSSAPVGKCE |
| | | QSLFAIPSFADDLLTQGVPWEY | | VLEVSQEMISEINSPLTPSM |
| | | IPFEALIMTLTQLLALKDFCST | | KLTSESSDSLVLPVEPDKNA |
| | | KIKRELLGNVKKVISAVAEIFS | | DLQRFQRDCGDASQEQHQRD |
| | | GNMQNDAHEFLGQCLDQLKEDM | | LENGSALESELVHERDRAIG |
| | | EKLNATLNTGKECGDENSSPQM | | EKELPVADSLMDQGDISLPV |
| | | HVGSAATKVFVCPVVANFEFEL | | MYEDGGKLISSPDTRLVEVH |
| | | QLSLICKACGHAVLKVEPNNYL | | LQEVPQHPELQKYEKTNTFV |
| | | SINLHQETKPLPLSIQNSLDLE | | EFNFDSVTESTNGFYDCKEN |
| | | FKEEELEYNCQMCKQKSCVARH | | RIPEGSQGMAEQLQQCIEES |
| | | TFSRLSRVLIIHLKRYSENNAW | | IIDEFLQQAPPPGVRKLDAQ |
| | | LLVKNNEQVYIPKSLSLSSYCN | | EHTEETLNQSTELRLQKADL |
| | | ESTKPPLPLSSSAPVGKCEVLE | | NHLGALGSDNPGNKNILDAE |
| | | VSQEMISEINSPLTPSMKLTSE | | NTRGEAKELTRNVKMGDPLQ |
| | | SSDSLVLPVEPDKN | | AYRLISVVSHIGSSPNSGHY |
| | | ADLQRFQRDCGDASQEQHQRDL | | ISDVYDFQKQAWFTYNDLCV |
| | | ENGSALESELVHERDRAIGEKE | | SEISETKMQEARLHSGYIFF |
| | | LPVADSLMDQGDISLPVMYEDG | | YMHN |
| | | GKLISSPDTRLVEVHLQEVPQH | | |
| | | PELQKYEKTNTFVEFNEDSVTE | | |
| | | STNGFYDCKENRIPEGSQGMAE | | |
| | | QLQQCIEESIIDEFLQQAPPPG | | |
| | | VRKLDAQEHTEETLNQSTELRL | | |
| | | QKADLNHLGALGSDNPGNKNIL | | |
| | | DAENTRGEAKELTRNVKMGDPL | | |
| | | QAYRLISVVSHIGSSPNSGHYI | | |
| | | SDVYDFQKQAWFTYNDLCVSEI | | |
| | | SETKMQEARLHSGYIFFYMHNG | | |
| | | IFEELLRKAENSRLPSTQAGVI | | |
| | | PQGEYEGDSLYRPA | | |
| UBP6_HUMAN | 55 | MDMVENADSLQAQERKDILMKY | 167 | KGATGLSNLGNTCEMNSSIQ |
| Ubiquitin | | DKGHRAGLPEDKGPEPVGINSS | | CVSNTQPLTQYFISGRHLYE |
| carboxyl- | | IDRFGILHETELPPVTAREAKK | | LNRTNPIGMKGHMAKCYGDL |
| terminal | | IRREMTRTSKWMEMLGEWETYK | | VQELWSGTQKSVAPLKLRRT |
| hydrolase 6 | | HSSKLIDRVYKGIPMNIRGPVW | | IAKYAPKFDGFQQQDSQELL |
| | | SVLLNIQEIKLKNPGRYQIMKE | | AFLLDGLHEDLNRVHEKPYV |
| | | RGKRSSEHIHHIDLDVRTTLRN | | ELKDSDGRPDWE |
| | | HVFFRDRYGAKQRELFYILLAY | | VAAEAWDNHLRRNRSIIVDL |
| | | SEYNPEVGYCRDLSHITALFLL | | FHGQLRSQVKCKTCGHISVR |
| | | YLPEEDAFWALVQLLASERHSL | | FDPNFLSLPLPMDSYMDLEI |
| | | PGFHSPNGGTVQGLQDQQEHVV | | TVIKLDGTTPVRYGLRLNMD |
| | | PKSQPKTMWHQDKEGLCGQCAS | | EKYTGLKKQLRDLCGLNSEQ |
| | | LGCLLRNLIDGISLGLTLRLWD | | ILLAEVHDSNIKNFPQDNQK |
| | | VYLVEGEQVLMPIT | | VQLSVSGELCAFEIPVPSSP |
| | | SIALKVQQKRLMKTSRCGLWAR | | ISASSPTQIDESSSPSTNGM |
| | | LRNQFFDTWAMNDDTVLKHLRA | | FTLTTNGDLPKPIFIPNGMP |
| | | STKKLTRKQGDLPPPAKREQGS | | NTVVPCGTEKNFTNGMVNGH |
| | | LAPRPVPASRGGKTLCKGYRQA | | MPSLPDSPFTGYIIAVHRKM |
| | | PPGPPAQFQRPICSASPPWASR | | MRTELYFLSPQENRPSLFGM |
| | | FSTPCPGGAVREDTYPVGTQGV | | PLIVPCTVHTRKKDLYDAVW |
| | | PSLALAQGGPQGSWRFLEWKSM | | IQVSWLARPLPPQEASIHAQ |
| | | PRLPTDLDIGGPWFPHYDFEWS | | DRDNCMGYQYPFTLRVVQKD |
| | | CWVRAISQEDQLATCWQAEHCG | | GNSCAWCPQYRFCRGCKIDC |
| | | EVHNKDMSWPEEMSFTANSSKI | | GEDRAFIGNAYIAVDWHPTA |
| | | DRQKVPTEKGATGLSNLGNTCF | | LHLRYQTSQERVVDKHESVE |
| | | MNSSIQCVSNTQPLTQYFISGR | | QSRRAQAEPINLDSCLRAFT |
| | | HLYELNRTNPIGMKGHMAKCYG | | SEEELGESEMYYCSKCKTHC |
| | | DLVQELWSGTQKSV | | LATKKLDLWRLPPFLIIHLK |
| | | APLKLRRTIAKYAPKEDGFQQQ | | RFQFVNDQWIKSQKIVRFLR |
| | | DSQELLAFLLDGLHEDLNRVHE | | ESFDPSAFLVPRDPALCQHK |
| | | KPYVELKDSDGRPDWEVAAEAW | | PLTPQGDELSKPRILAREVK |
| | | DNHLRRNRSIIVDLFHGQLRSQ | | KVDAQSSAGKEDMLLSKSPS |
| | | VKCKTCGHISVREDPENELSLP | | SLSANISSSPKGSPSSSRKS |
| | | LPMDSYMDLEITVIKLDGTTPV | | GTSCPSSKNSSPNSSPRTLG |
| | | RYGLRLNMDEKYTGLKKQLRDL | | RSKGRLRLPQIGSKNKPSSS |
| | | CGLNSEQILLAEVHDSNIKNFP | | KKNLDASKENGAGQICELAD |
| | | QDNQKVQLSVSGFLCAFEIPVP | | ALSRGHMRGGSQPELVTPQD |
| | | SSPISASSPTQIDFSSSPSTNG | | HEVALANGFLYEHEACGNGC |
| | | MFTLTTNGDLPKPIFIPNGMPN | | GDGYSNGQLGNHSEEDSTDD |
| | | TVVPCGTEKNFTNGMVNGHMPS | | QREDTHIKPIYNLYAISCHS |
| | | LPDSPFTGYIIAVHRKMMRTEL | | GILSGGHYITYAKNPNCKWY |
| | | YFLSPQENRPSLFG | | CYNDSSCEELHPDEIDTDSA |
| | | MPLIVPCTVHTRKKDLYDAVWI | | YILFYEQQG |
| | | QVSWLARPLPPQEASIHAQDRD | | |
| | | NCMGYQYPFTLRVVQKDGNSCA | | |
| | | WCPQYRFCRGCKIDCGEDRAFI | | |
| | | GNAYIAVDWHPTALHLRYQTSQ | | |
| | | ERVVDKHESVEQSRRAQAEPIN | | |
| | | LDSCLRAFTSEEELGESEMYYC | | |
| | | SKCKTHCLATKKLDLWRLPPEL | | |
| | | IIHLKRFQFVNDQWIKSQKIVR | | |
| | | FLRESFDPSAFLVPRDPALCQH | | |
| | | KPLTPQGDELSKPRILAREVKK | | |
| | | VDAQSSAGKEDMLLSKSPSSLS | | |
| | | ANISSSPKGSPSSSRKSGTSCP | | |
| | | SSKNSSPNSSPRTL | | |
| | | GRSKGRLRLPQIGSKNKPSSSK | | |
| | | KNLDASKENGAGQICELADALS | | |
| | | RGHMRGGSQPELVTPQDHEVAL | | |
| | | ANGFLYEHEACGNGCGDGYSNG | | |
| | | QLGNHSEEDSTDDQREDTHIKP | | |
| | | IYNLYAISCHSGILSGGHYITY | | |
| | | AKNPNCKWYCYNDSSCEELHPD | | |
| | | EIDTDSAYILFYEQQGIDYAQF | | |
| | | LPKIDGKKMADTSSTDEDSESD | | |
| | | YEKYSMLQ | | |
| UBP53_HUMAN | 56 | MAWVKFLRKPGGNLGKVYQPGS | 168 | APTKGLLNEPGQNSCFLNSA |
| Inactive | | MLSLAPTKGLLNEPGQNSCFLN | | VQVLWQLDIFRRSLRVLTGH |
| ubiquitin | | SAVQVLWQLDIFRRSLRVLTGH | | VCQGDACIFCALKTIFAQFQ |
| carboxyl- | | VCQGDACIFCALKTIFAQFQHS | | HSREKALPSDNIRHALAESF |
| terminal | | REKALPSDNIRHALAESFKDEQ | | KDEQRFQLGLMDDAAECFEN |
| hydrolase 53 | | RFQLGLMDDAAECFENMLERIH | | MLERIHFHIVPSRDADMCTS |
| | | FHIVPSRDADMCTSKSCITHQK | | KSCITHQKFAMTLYEQCVCR |
| | | FAMTLYEQCVCRSCGASSDPLP | | SCGASSDPLPFTEFVRYIST |
| | | FTEFVRYISTTALCNEVERMLE | | TALCNEVERMLERHERFKPE |
| | | RHERFKPEMFAELLQAANTTDD | | MFAELLQAANTTDDYRKCPS |
| | | YRKCPSNCGQKIKIRRVLMNCP | | NCGQKIKIRRVLMNCPEIVT |
| | | EIVTIGLVWDSEHSDLTEAVVR | | IGLVWDSEHSDLTEAVVRNL |
| | | NLATHLYLPGLFYRVTDENAKN | | ATHLYLPGLFYRVTDENAKN |
| | | SELNLVGMICYTSQ | | SELNLVGMICYTSQHYCAFA |
| | | HYCAFAFHTKSSKWVFEDDANV | | FHTKSSKWVFEDDANVKEIG |
| | | KEIGTRWKDVVSKCIRCHFQPL | | TRWKDVVSKCIRCHFQPLLL |
| | | LLFYANPDGTAVSTEDALRQVI | | FYANPDGTAVSTEDALRQVI |
| | | SWSHYKSVAENMGCEKPVIHKS | | SWSHYKSVAENMGCEKPVIH |
| | | DNLKENGFGDQAKQRENQKEPT | | KSDNLKENGFGDQAKQRENQ |
| | | DNISSSNRSHSHTGVGKGPAKL | | KFPTDNISSSNRSHSHTGVG |
| | | SHIDQREKIKDISRECALKAIE | | KGPAKLSHIDQREKIKDISR |
| | | QKNLLSSQRKDLEKGQRKDLGR | | ECALKAIEQKNLLSSQRKDL |
| | | HRDLVDEDLSHFQSGSPPAPNG | | EKGQRK |
| | | FKQHGNPHLYHSQGKGSYKHDR | | |
| | | VVPQSRASAQIISSSKSQILAP | | |
| | | GEKITGKVKSDNGTGYDTDSSQ | | |
| | | DSRDRGNSCDSSSKSRNRGWKP | | |
| | | MRETLNVDSIFSES | | |
| | | EKRQHSPRHKPNISNKPKSSKD | | |
| | | PSFSNWPKENPKQKGLMTIYED | | |
| | | EMKQEIGSRSSLESNGKGAEKN | | |
| | | KGLVEGKVHGDNWQMQRTESGY | | |
| | | ESSDHISNGSTNLDSPVIDGNG | | |
| | | TVMDISGVKETVCESDQITTSN | | |
| | | LNKERGDCTSLQSQHHLEGERK | | |
| | | ELRNLEAGYKSHEFHPESHLQI | | |
| | | KNHLIKRSHVHEDNGKLEPSSS | | |
| | | LQIPKDHNAREHIHQSDEQKLE | | |
| | | KPNECKESEWLNIENSERTGLP | | |
| | | FHVDNSASGKRVNSNEPSSLWS | | |
| | | SHLRTVGLKPETAPLIQQQNIM | | |
| | | DQCYFENSLSTECI | | |
| | | IRSASRSDGCQMPKLFCQNLPP | | |
| | | PLPPKKYAITSVPQSEKSESTP | | |
| | | DVKLTEVFKATSHLPKHSLSTA | | |
| | | SEPSLEVSTHMNDERHKETFQV | | |
| | | RECFGNTPNCPSSSSTNDEQAN | | |
| | | SGAIDAFCQPELDSISTCPNET | | |
| | | VSLTTYFSVDSCMTDTYRLKYH | | |
| | | QRPKLSFPESSGFCNNSLS | | |
| U17LO_HUMAN | 57 | MEDDSLYLRGEWQFNHESKLTS | 169 | AVGAGLQNMGNTCYVNASLQ |
| Ubiquitin | | SRPDAAFAEIQRTSLPEKSPLS | | CLTYTPPLANYMLSREHSQT |
| carboxyl- | | CETRVDLCDDLAPVARQLAPRE | | CHRHKGCMLCTMQAHITRAL |
| terminal | | KLPLSSRRPAAVGAGLQNMGNT | | HNPGHVIQPSQALAAGFHRG |
| hydrolase 17- | | CYVNASLQCLTYTPPLANYMLS | | KQEDAHEFLMFTVDAMKKAC |
| like protein 24 | | REHSQTCHRHKGCMLCTMQAHI | | LPGHKQVDHHSKDTTLIHQI |
| | | TRALHNPGHVIQPSQALAAGFH | | FGGYWRSQIKCLHCHGISDT |
| | | RGKQEDAHEFLMFTVDAMKKAC | | FDPYLDIALDIQAAQSVQQA |
| | | LPGHKQVDHHSKDTTLIHQIFG | | LEQLVKPEELNGENAYHCGV |
| | | GYWRSQIKCLHCHGISDTEDPY | | CLQRAPASKTLTLHTSAKVL |
| | | LDIALDIQAAQSVQQALEQLVK | | ILVLKRFSDVTGNKIAKNVQ |
| | | PEELNGENAYHCGVCLQRAPAS | | YPECLDMQPYMSQPNTGPLV |
| | | KTLTLHTSAKVLILVLKRESDV | | YVLYAVLVHAGWSCHNGHYF |
| | | TGNKIAKNVQYPEC | | SYVKAQEGQWYKMDDAEVTA |
| | | LDMQPYMSQPNTGPLVYVLYAV | | SSITSVLSQQAYVLFYIQKS |
| | | LVHAGWSCHNGHYFSYVKAQEG | | |
| | | QWYKMDDAEVTASSITSVLSQQ | | |
| | | AYVLFYIQKSEWERHSESVSRG | | |
| | | REPRALGAEDTDRRATQGELKR | | |
| | | DHPCLQAPELDEHLVERATQES | | |
| | | TLDHWKFLQEQNKTKPEFNVRK | | |
| | | VEGTLPPDVLVIHQSKYKCGMK | | |
| | | NHHPEQQSSLLNLSSSTPTHQE | | |
| | | SMNTGTLASLRGRARRSKGKNK | | |
| | | HSKRALLVCQ | | |
| U17LM_HUMAN | | MEDDSLYLGGEWQFNHESKLTS | | AVGAGLQNMGNTCYVNASLQ |
| Ubiquitin | | SRPDAAFAEIQRTSLPEKSPLS | | CLTYTPPLANYMLSREHSQT |
| carboxyl- | | CETRVDLCDDLAPVARQLAPRE | | CHRHKGCMLCTMQAHITRAL |
| terminal | | KLPLSSRRPAAVGAGLQNMGNT | | HNPGHVIQPSQALAAGFHRG |
| hydrolase 17- | | CYVNASLQCLTYTPPLANYMLS | | KQEDAHEFLMFTVDAMKKAC |
| like protein 22 | | REHSQTCHRHKGCMLCTMQAHI | | LPGHKQVDHHSKDTTLIHQI |
| | | TRALHNPGHVIQPSQALAAGFH | | FGGYWRSQIKCLHCHGISDT |
| | | RGKQEDAHEFLMFTVDAMKKAC | | FDPYLDIALDIQAAQSVQQA |
| | | LPGHKQVDHHSKDTTLIHQIFG | | LEQLVKPEELNGENAYHCGV |
| | | GYWRSQIKCLHCHGISDTEDPY | | CLQRAPASKTLTLHTSAKVL |
| | | LDIALDIQAAQSVQQALEQLVK | | ILVLKRFSDVTGNKIAKNVQ |
| | | PEELNGENAYHCGVCLQRAPAS | | YPECLDMQPYMSQQNTGPLV |
| | | KTLTLHTSAKVLILVLKRESDV | | YVLYAVLVHAGWSCHNGHYF |
| | | TGNKIAKNVQYPEC | | SYVKAQEGQWYKMDDAEVTA |
| | | LDMQPYMSQQNTGPLVYVLYAV | | SSITSVLSQQAYVLFYIQKS |
| | | LVHAGWSCHNGHYFSYVKAQEG | | |
| | | QWYKMDDAEVTASSITSVLSQQ | | |
| | | AYVLFYIQKSEWERHSESVSRG | | |
| | | REPRALGAEDTDRRATQGELKR | | |
| | | DHPCLQAPELDEHLVERATQES | | |
| | | TLDHWKFLQEQNKTKPEFNVRK | | |
| | | VEGTLPPDVLVIHQSKYKCGMK | | |
| | | NHHPEQQSSLLKLSSTTPTHQE | | |
| | | SMNTGTLASLRGRARRSKGKNK | | |
| | | HSKRALLVCQ | | |
| UBP5_HUMAN | 58 | MAELSEEALLSVLPTIRVPKAG | 170 | FGPGYTGIRNLGNSCYLNSV |
| Ubiquitin | | DRVHKDECAFSEDTPESEGGLY | | VQVLESIPDFQRKYVDKLEK |
| carboxyl- | | ICMNTFLGFGKQYVERHENKTG | | IFQNAPTDPTQDESTQVAKL |
| terminal | | QRVYLHLRRTRRPKEEDPATGT | | GHGLLSGEYSKPVPESGDGE |
| hydrolase 5 | | GDPPRKKPTRLAIGVEGGEDLS | | RVPEQKEVQDGIAPRMEKAL |
| | | EEKFELDEDVKIVILPDYLEIA | | IGKGHPEFSTNRQQDAQEFF |
| | | RDGLGGLPDIVRDRVTSAVEAL | | LHLINMVERNCRSSENPNEV |
| | | LSADSASRKQEVQAWDGEVRQV | | FRFLVEEKIKCLATEKVKYT |
| | | SKHAFSLKQLDNPARIPPCGWK | | QRVDYIMQLPVPMDAALNKE |
| | | CSKCDMRENLWLNLTDGSILCG | | ELLEYEEKKRQAEEEKMALP |
| | | RRYFDGSGGNNHAVEHYRETGY | | ELVRAQVPESSCLEAYGAPE |
| | | PLAVKLGTITPDGADVYSYDED | | QVDDFWSTALQAKSVAVKTT |
| | | DMVLDPSLAEHLSHFGIDMLKM | | RFASFPDYLVIQIKKFTFGL |
| | | QKTDKTMTELEIDM | | DWVPKKLDVSIEMPEELDIS |
| | | NQRIGEWELIQESGVPLKPLFG | | QLRGTGLQPGEEELPDIAPP |
| | | PGYTGIRNLGNSCYLNSVVQVL | | LVTPDEPKGSLGFYGNEDED |
| | | FSIPDFQRKYVDKLEKIFQNAP | | SFCSPHFSSPTSPMLDESVI |
| | | TDPTQDESTQVAKLGHGLLSGE | | IQLVEMGFPMDACRKAVYYT |
| | | YSKPVPESGDGERVPEQKEVQD | | GNSGAEAAMNWVMSHMDDPD |
| | | GIAPRMFKALIGKGHPEFSTNR | | FANPLILPGSSGPGSTSAAA |
| | | QQDAQEFFLHLINMVERNCRSS | | DPPPEDCVTTIVSMGFSRDQ |
| | | ENPNEVERELVEEKIKCLATEK | | ALKALRATNNSLERAVDWIE |
| | | VKYTQRVDYIMQLPVPMDAALN | | SHIDDLDAEAAMDISEGRSA |
| | | KEELLEYEEKKRQAEEEKMALP | | ADSISESVPVGPKVRDGPGK |
| | | ELVRAQVPFSSCLEAYGAPEQV | | YQLFAFISHMGTSTMCGHYV |
| | | DDFWSTALQAKSVAVKTTRFAS | | CHIKKEGRWVIYNDQKVCAS |
| | | FPDYLVIQIKKFTFGLDWVPKK | | EKPPKDLGYIYFYQRVA |
| | | LDVSIEMPEELDIS | | |
| | | QLRGTGLQPGEEELPDIAPPLV | | |
| | | TPDEPKGSLGFYGNEDEDSFCS | | |
| | | PHESSPTSPMLDESVIIQLVEM | | |
| | | GFPMDACRKAVYYTGNSGAEAA | | |
| | | MNWVMSHMDDPDFANPLILPGS | | |
| | | SGPGSTSAAADPPPEDCVTTIV | | |
| | | SMGFSRDQALKALRATNNSLER | | |
| | | AVDWIFSHIDDLDAEAAMDISE | | |
| | | GRSAADSISESVPVGPKVRDGP | | |
| | | GKYQLFAFISHMGTSTMCGHYV | | |
| | | CHIKKEGRWVIYNDQKVCASEK | | |
| | | PPKDLGYIYFYQRVAS | | |
| UBP25_HUMAN | 59 | MTVEQNVLQQSAAQKHQQTELN | | KAPVGLKNVGNTCWFSAVIQ |
| Ubiquitin | | QLREITGINDTQILQQALKDSN | | SLENLLEFRRLVLNYKPPSN |
| carboxyl- | | GNLELAVAFLTAKNAKTPQQEE | | AQDLPRNQKEHRNLPEMREL |
| terminal | | TTYYQTALPGNDRYISVGSQAD | | RYLFALLVGTKRKYVDPSRA |
| hydrolase 25 | | TNVIDLTGDDKDDLQRAIALSL | | VEILKDAFKSNDSQQQDVSE |
| | | AESNRAFRETGITDEEQAISRV | | FTHKLLDWLEDAFQMKAEEE |
| | | LEASIAENKACLKRTPTEVWRD | | TDEEKPKNPMVELFYGRFLA |
| | | SRNPYDRKRQDKAPVGLKNVGN | | VGVLEGKKFENTEMFGQYPL |
| | | TCWFSAVIQSLENLLEFRRLVL | | QVNGFKDLHECLEAAMIEGE |
| | | NYKPPSNAQDLPRNQKEHRNLP | | IESLHSENSGKSGQEHWFTE |
| | | FMRELRYLFALLVGTKRKYVDP | | LPPVLTFELSRFEFNQALGR |
| | | SRAVEILKDAFKSNDSQQQDVS | | PEKIHNKLEFPQVLYLDRYM |
| | | EFTHKLLDWLEDAFQMKAEEET | | HRNREITRIKREEIKRLKDY |
| | | DEEKPKNPMVELFY | | LTVLQQRLERYLSYGSGPKR |
| | | GRFLAVGVLEGKKFENTEMEGQ | | FPLVDVLQYALEFASSKPVC |
| | | YPLQVNGFKDLHECLEAAMIEG | | TSPVDDIDASSPPSGSIPSQ |
| | | EIESLHSENSGKSGQEHWFTEL | | TLPSTTEQQGALSSELPSTS |
| | | PPVLTFELSRFEFNQALGRPEK | | PSSVAAISSRSVIHKPFTQS |
| | | IHNKLEFPQVLYLDRYMHRNRE | | RIPPDLPMHPAPRHITEEEL |
| | | ITRIKREEIKRLKDYLTVLQQR | | SVLESCLHRWRTEIENDTRD |
| | | LERYLSYGSGPKRFPLVDVLQY | | LQESISRIHRTIELMYSDKS |
| | | ALEFASSKPVCTSPVDDIDASS | | MIQVPYRLHAVLVHEGQANA |
| | | PPSGSIPSQTLPSTTEQQGALS | | GHYWAYIFDHRESRWMKYND |
| | | SELPSTSPSSVAAISSRSVIHK | | IAVTKSSWEELVRDSFGGYR |
| | | PFTQSRIPPDLPMHPAPRHITE | | NAS |
| | | EELSVLESCLHRWRTEIENDTR | | |
| | | DLQESISRIHRTIELMYSDKSM | | |
| | | IQVPYRLHAVLVHE | | |
| | | GQANAGHYWAYIFDHRESRWMK | | |
| | | YNDIAVTKSSWEELVRDSFGGY | | |
| | | RNASAYCLMYINDKAQFLIQEE | | |
| | | FNKETGQPLVGIETLPPDLRDF | | |
| | | VEEDNQRFEKELEEWDAQLAQK | | |
| | | ALQEKLLASQKLRESETSVTTA | | |
| | | QAAGDPEYLEQPSRSDFSKHLK | | |
| | | EETIQIITKASHEHEDKSPETV | | |
| | | LQSAIKLEYARLVKLAQEDTPP | | |
| | | ETDYRLHHVVVYFIQNQAPKKI | | |
| | | IEKTLLEQFGDRNLSFDERCHN | | |
| | | IMKVAQAKLEMIKPEEVNLEEY | | |
| | | EEWHQDYRKERETTMYLIIGLE | | |
| | | NFQRESYIDSLLEL | | |
| | | ICAYQNNKELLSKGLYRGHDEE | | |
| | | LISHYRRECLLKLNEQAAELFE | | |
| | | SGEDREVNNGLIIMNEFIVPEL | | |
| | | PLLLVDEMEEKDILAVEDMRNR | | |
| | | WCSYLGQEMEPHLQEKLTDELP | | |
| | | KLLDCSMEIKSFHEPPKLPSYS | | |
| | | THELCERFARIMLSLSRTPADG | | |
| | | R | | |
| UBP33_HUMAN | 60 | MTGSNSHITILTLKVLPHFESL | 171 | ARGLTGLKNIGNTCYMNAAL |
| Ubiquitin | | GKQEKIPNKMSAFRNHCPHLDS | | QALSNCPPLTQFELDCGGLA |
| carboxyl- | | VGEITKEDLIQKSLGTCQDCKV | | RTDKKPAICKSYLKLMTELW |
| terminal | | QGPNLWACLENRCSYVGCGESQ | | HKSRPGSVVPTTLFQGIKTV |
| hydrolase 33 | | VDHSTIHSQETKHYLTVNLTTL | | NPTFRGYSQQDAQEFLRCLM |
| | | RVWCYACSKEVELDRKLGTQPS | | DLLHEELKEQVMEVEEDPQT |
| | | LPHVRQPHQIQENSVQDFKIPS | | ITTEETMEEDKSQSDVDFQS |
| | | NTTLKTPLVAVEDDLDIEADEE | | CESCSNSDRAENENGSRCFS |
| | | DELRARGLTGLKNIGNTCYMNA | | EDNNETTMLIQDDENNSEMS |
| | | ALQALSNCPPLTQFELDCGGLA | | KDWQKEKMCNKINKVNSEGE |
| | | RTDKKPAICKSYLKLMTELWHK | | FDKDRDSISETVDLNNQETV |
| | | SRPGSVVPTTLFQGIKTVNPTF | | KVQIHSRASEYITDVHSNDL |
| | | RGYSQQDAQEFLRCLMDLLHEE | | STPQILPSNEGVNPRLSASP |
| | | LKEQVMEVEEDPQT | | PKSGNLWPGLAPPHKKAQSA |
| | | ITTEETMEEDKSQSDVDFQSCE | | SPKRKKQHKKYRSVISDIED |
| | | SCSNSDRAENENGSRCFSEDNN | | GTIISSVQCLTCDRVSVTLE |
| | | ETTMLIQDDENNSEMSKDWQKE | | TFQDLSLPIPGKEDLAKLHS |
| | | KMCNKINKVNSEGEFDKDRDSI | | SSHPTSIVKAGSCGEAYAPQ |
| | | SETVDLNNQETVKVQIHSRASE | | GWIAFFMEYVKRFVVSCVPS |
| | | YITDVHSNDLSTPQILPSNEGV | | WFWGPVVTLQDCLAAFFARD |
| | | NPRLSASPPKSGNLWPGLAPPH | | ELKGDNMYSCEKCKKLRNGV |
| | | KKAQSASPKRKKQHKKYRSVIS | | KFCKVQNFPEILCIHLKRER |
| | | DIFDGTIISSVQCLTCDRVSVT | | HELMESTKISTHVSFPLEGL |
| | | LETFQDLSLPIPGKEDLAKLHS | | DLQPFLAKDSPAQIVTYDLL |
| | | SSHPTSIVKAGSCGEAYAPQGW | | SVICHHGTASSGHYIAYCRN |
| | | IAFFMEYVKRFVVSCVPSWFWG | | NLNNLWYEFDDQSVTEVSES |
| | | PVVTLQDCLAAFFARDELKGDN | | TVQNAEAYVLFYRKSS |
| | | MYSCEKCKKLRNGV | | |
| | | KFCKVQNFPEILCIHLKRFRHE | | |
| | | LMFSTKISTHVSFPLEGLDLQP | | |
| | | FLAKDSPAQIVTYDLLSVICHH | | |
| | | GTASSGHYIAYCRNNLNNLWYE | | |
| | | FDDQSVTEVSESTVQNAEAYVL | | |
| | | FYRKSSEEAQKERRRISNLLNI | | |
| | | MEPSLLQFYISRQWLNKFKTFA | | |
| | | EPGPISNNDFLCIHGGVPPRKA | | |
| | | GYIEDLVLMLPQNIWDNLYSRY | | |
| | | GGGPAVNHLYICHTCQIEAEKI | | |
| | | EKRRKTELEIFIRLNRAFQKED | | |
| | | SPATFYCISMQWFREWESFVKG | | |
| | | KDGDPPGPIDNTKIAVTKCGNV | | |
| | | MLRQGADSGQISEETWNFLQSI | | |
| | | YGGGPEVILRPPVVHVDPDILQ | | |
| | | AEEKIEVETRSL | | |
| UBP21_HUMAN | 61 | MPQASEHRLGRTREPPVNIQPR | 172 | LGSGHVGLRNLGNTCFLNAV |
| Ubiquitin | | VGSKLPFAPRARSKERRNPASG | | LQCLSSTRPLRDFCLRRDER |
| carboxyl- | | PNPMLRPLPPRPGLPDERLKKL | | QEVPGGGRAQELTEAFADVI |
| terminal | | ELGRGRTSGPRPRGPLRADHGV | | GALWHPDSCEAVNPTRFRAV |
| hydrolase 21 | | PLPGSPPPTVALPLPSRTNLAR | | FQKYVPSFSGYSQQDAQEFL |
| | | SKSVSSGDLRPMGIALGGHRGT | | KLLMERLHLEINRRGRRAPP |
| | | GELGAALSRLALRPEPPTLRRS | | ILANGPVPSPPRRGGALLEE |
| | | TSLRRLGGFPGPPTLFSIRTEP | | PELSDDDRANLMWK |
| | | PASHGSFHMISARSSEPFYSDD | | RYLEREDSKIVDLFVGQLKS |
| | | KMAHHTLLLGSGHVGLRNLGNT | | CLKCQACGYRSTTFEVECDL |
| | | CFLNAVLQCLSSTRPLRDFCLR | | SLPIPKKGFAGGKVSLRDCF |
| | | RDFRQEVPGGGRAQELTEAFAD | | NLFTKEEELESENAPVCDRC |
| | | VIGALWHPDSCEAVNPTRERAV | | RQKTRSTKKLTVQRFPRILV |
| | | FQKYVPSFSGYSQQ | | LHLNRFSASRGSIKKSSVGV |
| | | DAQEFLKLLMERLHLEINRRGR | | DFPLQRLSLGDFASDKAGSP |
| | | RAPPILANGPVPSPPRRGGALL | | VYQLYALCNHSGSVHYGHYT |
| | | EEPELSDDDRANLMWKRYLERE | | ALCRCQTGWHVYNDSRVSPV |
| | | DSKIVDLFVGQLKSCLKCQACG | | SENQVASSEGYVLFYQLMQ |
| | | YRSTTFEVFCDLSLPIPKKGFA | | |
| | | GGKVSLRDCENLFTKEEELESE | | |
| | | NAPVCDRCRQKTRSTKKLTVQR | | |
| | | FPRILVLHLNRESASRGSIKKS | | |
| | | SVGVDFPLQRLSLGDFASDKAG | | |
| | | SPVYQLYALCNHSGSVHYGHYT | | |
| | | ALCRCQTGWHVYNDSRVSPVSE | | |
| | | NQVASSEGYVLFYQLMQEPPRC | | |
| | | L | | |
| U17L4_HUMAN | 62 | MGDDSLYLGGEWQFNHESKLTS | 173 | AVGAGLQNMGNTCYENASLQ |
| Inactive | | SRPDAAFAEIQRTSLPEKSPLS | | CLTYTLPLANYMLSREHSQT |
| ubiquitin | | SETRVDLCDDLAPVARQLAPRE | | CQRPKCCMLCTMQAHITWAL |
| carboxyl- | | KLPLSSRRPAAVGAGLQNMGNT | | HSPGHVIQPSQALAAGFHRG |
| terminal | | CYENASLQCLTYTLPLANYMLS | | KQEDVHEFLMFTVDAMKKAC |
| hydrolase 17- | | REHSQTCQRPKCCMLCTMQAHI | | LPGHKQVDHHSKDTTLIHQI |
| like protein 4 | | TWALHSPGHVIQPSQALAAGFH | | FGGCWRSQIKCLHCHGISDT |
| | | RGKQEDVHEFLMFTVDAMKKAC | | FDPYLDIALDIQAAQSVKQA |
| | | LPGHKQVDHHSKDTTLIHQIFG | | LEQLVKPEELNGENAYHCGL |
| | | GCWRSQIKCLHCHGISDTEDPY | | CLQRAPASNTLTLHTSAKVL |
| | | LDIALDIQAAQSVKQALEQLVK | | ILVLKRFSDVAGNKLAKNVQ |
| | | PEELNGENAYHCGLCLQRAPAS | | YPECLDMQPYMSQQNTGPLV |
| | | NTLTLHTSAKVLILVLKRESDV | | YVLYAVLVHAGWSCHDGYYF |
| | | AGNKLAKNVQYPEC | | SYVKAQEGQWYKMDDAEVTV |
| | | LDMQPYMSQQNTGPLVYVLYAV | | CSITSVLSQQAYVLFYIQKS |
| | | LVHAGWSCHDGYYFSYVKAQEG | | |
| | | QWYKMDDAEVTVCSITSVLSQQ | | |
| | | AYVLFYIQKSEWERHSESVSRG | | |
| | | REPRALGAEDTDRPATQGELKR | | |
| | | DHPCLQVPELDEHLVERATEES | | |
| | | TLDHWKFPQEQNKMKPEFNVRK | | |
| | | VEGTLPPNVLVIHQSKYKCGMK | | |
| | | NHHPEQQSSLLNLSSMNSTDQE | | |
| | | SMNTGTLASLQGRTRRSKGKNK | | |
| | | HSKRSLLVCQ | | |
| U17LK_HUMAN | 63 | MEDDSLYLGGEWQFNHESKLTS | 174 | AVGAGLQNMGNTCYVNASLQ |
| Ubiquitin | | SRPDAAFAEIQRTSLPEKSPLS | | CLTYTPPLANYMLSREHSQT |
| carboxyl- | | CETRVDLCDDLAPVARQLAPRE | | CHRHKGCMLCTMQAHITRAL |
| terminal | | KLPLSSRRPAAVGAGLQNMGNT | | HNPGHVIQPSQALAAGFHRG |
| hydrolase 17- | | CYVNASLQCLTYTPPLANYMLS | | KQEDAHEFLMFTVDAMKKAC |
| like protein 20 | | REHSQTCHRHKGCMLCTMQAHI | | LPGHKQVDHHSKDTTLIHQI |
| | | TRALHNPGHVIQPSQALAAGFH | | FGGYWRSQIKCLHCHGISDT |
| | | RGKQEDAHEFLMFTVDAMKKAC | | FDPYLDIALDIQAAQSVQQA |
| | | LPGHKQVDHHSKDTTLIHQIFG | | LEQLVKPEELNGENAYHCGV |
| | | GYWRSQIKCLHCHGISDTFDPY | | CLQRAPASKTLTLHTSAKVL |
| | | LDIALDIQAAQSVQQALEQLVK | | ILVLKRFSDVTGNKIAKNVQ |
| | | PEELNGENAYHCGVCLQRAPAS | | YPECLDMQPYMSQPNTGPLV |
| | | KTLTLHTSAKVLILVLKRFSDV | | YVLYAVLVHAGWSCHNGHYF |
| | | TGNKIAKNVQYPECLDMQPYMS | | SYVKAQEGQWYKMDDAEVTA |
| | | QPNTGPLVYVLYAVLVHAGWSC | | SSITSVLSQQAYVLFYIQKS |
| | | HNGHYFSYVKAQEGQWYKMDDA | | |
| | | EVTASSITSVLSQQAYVLFYIQ | | |
| | | KSEWERHSESVSRGREPRALGA | | |
| | | EDTDRRATQGELKRDHPCLQAP | | |
| | | ELDEHLVERATQESTLDHWKEL | | |
| | | QEQNKTKPEFNVRKVEGTLPPD | | |
| | | VLVIHQSKYKCGMKNHHPEQQS | | |
| | | SLLNLSSTTPTHQESMNTGTLA | | |
| | | SLRGRARRSKGKNKHSKRALLV | | |
| | | CQ | | |
| UBP12_HUMAN | 64 | MEILMTVSKFASICTMGANASA | 175 | EHYFGLVNFGNTCYCNSVLQ |
| Ubiquitin | | LEKEIGPEQFPVNEHYFGLVNE | | ALYFCRPFREKVLAYKSQPR |
| carboxyl- | | GNTCYCNSVLQALYFCRPFREK | | KKESLLTCLADLFHSIATQK |
| terminal | | VLAYKSQPRKKESLLTCLADLF | | KKVGVIPPKKFITRLRKENE |
| hydrolase 12 | | HSIATQKKKVGVIPPKKFITRL | | LFDNYMQQDAHEFLNYLLNT |
| | | RKENELFDNYMQQDAHEFLNYL | | IADILQEERKQEKQNGRLPN |
| | | LNTIADILQEERKQEKQNGRLP | | GNIDNENNNSTPDPTWVHEI |
| | | NGNIDNENNNSTPDPTWVHEIF | | FQGTLTNETRCLTCETISSK |
| | | QGTLTNETRCLTCETISSKDED | | DEDFLDLSVDVEQNTSITHC |
| | | FLDLSVDVEQNTSITHCLRGES | | LRGFSNTETLCSEYKYYCEE |
| | | NTETLCSEYKYYCEECRSKQEA | | CRSKQEAHKRMKVKKLPMIL |
| | | HKRMKVKKLPMILALHLKRFKY | | ALHLKRFKYMDQLHRYTKLS |
| | | MDQLHRYTKLSYRVVFPLELRL | | YRVVFPLELRLENTSGDATN |
| | | FNTSGDATNPDRMY | | PDRMYDLVAVVVHCGSGPNR |
| | | DLVAVVVHCGSGPNRGHYIAIV | | GHYIAIVKSHDFWLLEDDDI |
| | | KSHDEWLLEDDDIVEKIDAQAI | | VEKIDAQAIEEFYGLTSDIS |
| | | EEFYGLTSDISKNSESGYILFY | | KNSESGYILFYQSR |
| | | QSRD | | |
| UL17C_HUMAN | 65 | MEEDSLYLGGEWQFNHESKLTS | 176 | AVGAGLQNMGNTCYVNASLQ |
| Ubiquitin | | SRPDAAFAEIQRTSLPEKSPLS | | CLTYTPPLANYMLSREHSQT |
| carboxyl- | | CETRVDLCDDLAPVARQLAPRE | | CHRHKGCMLCTMQAHITRAL |
| terminal | | KLPLSNRRPAAVGAGLQNMGNT | | HNPGHVIQPSQALAAGFHRG |
| hydrolase 17- | | CYVNASLQCLTYTPPLANYMLS | | KQEDAHEFLMFTVDAMKKAC |
| like protein 12 | | REHSQTCHRHKGCMLCTMQAHI | | LPGHKQVDHHSKDTTLIHQI |
| | | TRALHNPGHVIQPSQALAAGFH | | FGGYWRSQIKCLHCHGISDT |
| | | RGKQEDAHEFLMFTVDAMKKAC | | FDPYLDIALDIQAAQSVQQA |
| | | LPGHKQVDHHSKDTTLIHQIFG | | LEQLVKPEELNGENAYHCGV |
| | | GYWRSQIKCLHCHGISDTFDPY | | CLQRAPASKMLTLLTSAKVL |
| | | LDIALDIQAAQSVQQALEQLVK | | ILVLKRFSDVTGNKIAKNVQ |
| | | PEELNGENAYHCGVCLQRAPAS | | YPECLDMQPYMSQPNTGPLV |
| | | KMLTLLTSAKVLILVLKRFSDV | | YVLYAVLVHAGWSCHNGHYF |
| | | TGNKIAKNVQYPEC | | SYVKAQEGQWYKMDDAEVTA |
| | | LDMQPYMSQPNTGPLVYVLYAV | | SSITSVLSQQAYVLFYIQKS |
| | | LVHAGWSCHNGHYFSYVKAQEG | | |
| | | QWYKMDDAEVTASSITSVLSQQ | | |
| | | AYVLFYIQKSEWERHSESVSRG | | |
| | | REPRALGAEDTDRRATQGELKR | | |
| | | DHPCLQAPELDEHLVERATQES | | |
| | | TLDHWKFLQEQNKTKPEFNVRK | | |
| | | VEGTLPPDVLVIHQSKYKCGMK | | |
| | | NHHPEQQSSLLKLSSTTPTHQE | | |
| | | SMNTGTLASLRGRARRSKGKNK | | |
| | | HSKRALLVCQ | | |
| UBP20_HUMAN | 66 | MGDSRDLCPHLDSIGEVTKEDL | 177 | PRGLTGMKNLGNSCYMNAAL |
| Ubiquitin | | LLKSKGTCQSCGVTGPNLWACL | | QALSNCPPLTQFFLECGGLV |
| carboxyl- | | QVACPYVGCGESFADHSTIHAQ | | RTDKKPALCKSYQKLVSEVW |
| terminal | | AKKHNLTVNLTTFRLWCYACEK | | HKKRPSYVVPTSLSHGIKLV |
| hydrolase | | EVFLEQRLAAPLLGSSSKESEQ | | NPMFRGYAQQDTQEFLRCLM |
| | | DSPPPSHPLKAVPIAVADEGES | | DQLHEELKEPVVATVALTEA |
| | | ESEDDDLKPRGLTGMKNLGNSC | | RDSDSSDTDEKREGDRSPSE |
| | | YMNAALQALSNCPPLTQFFLEC | | DEFLSCDSSSDRGEGDGQGR |
| | | GGLVRTDKKPALCKSYQKLVSE | | GGGSSQAETELLIPDEAGRA |
| | | VWHKKRPSYVVPTSLSHGIKLV | | ISEKERMKDRKFSWGQQRTN |
| | | NPMFRGYAQQDTQEFLRCLMDQ | | SEQVDEDADVDTAMAALDDQ |
| | | LHEELKEPVVATVALTEARDSD | | PAEAQPPSPRSSSPCRTPEP |
| | | SSDTDEKREGDRSPSEDEFLSC | | DNDAHLRSSSRPCSPVHHHE |
| | | DSSSDRGEGDGQGR | | GHAKLSSSPPRASPVRMAPS |
| | | GGGSSQAETELLIPDEAGRAIS | | YVLKKAQVLSAGSRRRKEQR |
| | | EKERMKDRKFSWGQQRTNSEQV | | YRSVISDIFDGSILSLVQCL |
| | | DEDADVDTAMAALDDQPAEAQP | | TCDRVSTTVETFQDLSLPIP |
| | | PSPRSSSPCRTPEPDNDAHLRS | | GKEDLAKLHSAIYQNVPAKP |
| | | SSRPCSPVHHHEGHAKLSSSPP | | GACGDSYAAQGWLAFIVEYI |
| | | RASPVRMAPSYVLKKAQVLSAG | | RRFVVSCTPSWFWGPVVTLE |
| | | SRRRKEQRYRSVISDIFDGSIL | | DCLAAFFAADELKGDNMYSC |
| | | SLVQCLTCDRVSTTVETFQDLS | | ERCKKLRNGVKYCKVLRLPE |
| | | LPIPGKEDLAKLHSAIYQNVPA | | ILCIHLKRFRHEVMYSFKIN |
| | | KPGACGDSYAAQGWLAFIVEYI | | SHVSFPLEGLDLRPFLAKEC |
| | | RRFVVSCTPSWFWGPVVTLEDC | | TSQITTYDLLSVICHHGTAG |
| | | LAAFFAADELKGDNMYSCERCK | | SGHYIAYCQNVINGQWYEFD |
| | | KLRNGVKYCKVLRLPEILCIHL | | DQYVTEVHETVVQNAEGYVL |
| | | KRFRHEVMYSEKIN | | FYRKSS |
| | | SHVSFPLEGLDLRPFLAKECTS | | |
| | | QITTYDLLSVICHHGTAGSGHY | | |
| | | IAYCQNVINGQWYEFDDQYVTE | | |
| | | VHETVVQNAEGYVLFYRKSSEE | | |
| | | AMRERQQVVSLAAMREPSLLRF | | |
| | | YVSREWLNKENTFAEPGPITNQ | | |
| | | TFLCSHGGIPPHKYHYIDDLVV | | |
| | | ILPQNVWEHLYNRFGGGPAVNH | | |
| | | LYVCSICQVEIEALAKRRRIEI | | |
| | | DTFIKLNKAFQAEESPGVIYCI | | |
| | | SMQWFREWEAFVKGKDNEPPGP | | |
| | | IDNSRIAQVKGSGHVQLKQGAD | | |
| | | YGQISEETWTYLNSLYGGGPEI | | |
| | | AIRQSVAQPLGPENLHGEQKIE | | |
| | | AETRAV | | |
| UBP46_HUMAN | 67 | MTVRNIASICNMGTNASALEKD | 178 | EHYFGLVNFGNTCYCNSVLQ |
| Ubiquitin | | IGPEQFPINEHYFGLVNEGNTC | | ALYFCRPFRENVLAYKAQQK |
| carboxyl- | | YCNSVLQALYFCRPFRENVLAY | | KKENLLTCLADLEHSIATQK |
| terminal | | KAQQKKKENLLTCLADLFHSIA | | KKVGVIPPKKFISRLRKEND |
| hydrolase 46 | | TQKKKVGVIPPKKFISRLRKEN | | LFDNYMQQDAHEFLNYLLNT |
| | | DLEDNYMQQDAHEFLNYLLNTI | | IADILQEEKKQEKQNGKLKN |
| | | ADILQEEKKQEKQNGKLKNGNM | | GNMNEPAENNKPELTWVHEI |
| | | NEPAENNKPELTWVHEIFQGTL | | FQGTLTNETRCLNCETVSSK |
| | | TNETRCLNCETVSSKDEDELDL | | DEDFLDLSVDVEQNTSITHC |
| | | SVDVEQNTSITHCLRDESNTET | | LRDESNTETLCSEQKYYCET |
| | | LCSEQKYYCETCCSKQEAQKRM | | CCSKQEAQKRMRVKKLPMIL |
| | | RVKKLPMILALHLKRFKYMEQL | | ALHLKRFKYMEQLHRYTKLS |
| | | HRYTKLSYRVVFPLELRLENTS | | YRVVFPLELRLENTSSDAVN |
| | | SDAVNLDRMYDLVA | | LDRMYDLVAVVVHCGSGPNR |
| | | VVVHCGSGPNRGHYITIVKSHG | | GHYITIVKSHGFWLLEDDDI |
| | | FWLLEDDDIVEKIDAQAIEEFY | | VEKIDAQAIEEFYGLTSDIS |
| | | GLTSDISKNSESGYILFYQSRE | | KNSESGYILFYQSR |
| CYLD_HUMAN | 68 | MSSGLWSQEKVTSPYWEERIFY | 179 | GKKKGIQGHYNSCYLDSTLF |
| Ubiquitin | | LLLQECSVTDKQTQKLLKVPKG | | CLFAFSSVLDTVLLRPKEKN |
| carboxyl- | | SIGQYIQDRSVGHSRIPSAKGK | | DVEYYSETQELLRTEIVNPL |
| terminal | | KNQIGLKILEQPHAVLFVDEKD | | RIYGYVCATKIMKLRKILEK |
| hydrolase | | VVEINEKFTELLLAITNCEERE | | VEAASGFTSEEKDPEEFLNI |
| CYLD | | SLFKNRNRLSKGLQIDVGCPVK | | LFHHILRVEPLLKIRSAGQK |
| | | VQLRSGEEKFPGVVRERGPLLA | | VQDCYFYQIFME |
| | | ERTVSGIFFGVELLEEGRGQGF | | KNEKVGVPTIQQLLEWSFIN |
| | | TDGVYQGKQLFQCDEDCGVEVA | | SNLKFAEAPSCLIIQMPREG |
| | | LDKLELIEDDDTALESDYAGPG | | KDFKLFKKIFPSLELNITDL |
| | | DTMQVELPPLEINSRVSLKVGE | | LEDTPRQCRICGGLAMYECR |
| | | TIESGTVIFCDVLPGKESLGYF | | ECYDDPDISAGKIKQFCKTC |
| | | VGVDMDNPIGNWDGREDGVQLC | | NTQVHLHPKRLNHKYNPVSL |
| | | SFACVESTILLHIN | | PKDLPDWDWRHGCIPCQNME |
| | | DIIPALSESVTQERRPPKLAFM | | LFAVLCIETSHYVAFVKYGK |
| | | SRGVGDKGSSSHNKPKATGSTS | | DDSAWLFFDSMADRDGGQNG |
| | | DPGNRNRSELFYTLNGSSVDSQ | | FNIPQVTPCPEVGEYLKMSL |
| | | PQSKSKNTWYIDEVAEDPAKSL | | EDLHSLDSRRIQGCARRLLC |
| | | TEISTDEDRSSPPLQPPPVNSL | | DAYMCMYQSPT |
| | | TTENRFHSLPFSLTKMPNINGS | | |
| | | IGHSPLSLSAQSVMEELNTAPV | | |
| | | QESPPLAMPPGNSHGLEVGSLA | | |
| | | EVKENPPFYGVIRWIGQPPGLN | | |
| | | EVLAGLELEDECAGCTDGTFRG | | |
| | | TRYFTCALKKALFVKLKSCRPD | | |
| | | SRFASLQPVSNQIERCNSLAFG | | |
| | | GYLSEVVEENTPPKMEKEGLEI | | |
| | | MIGKKKGIQGHYNS | | |
| | | CYLDSTLFCLFAFSSVLDTVLL | | |
| | | RPKEKNDVEYYSETQELLRTEI | | |
| | | VNPLRIYGYVCATKIMKLRKIL | | |
| | | EKVEAASGFTSEEKDPEEFLNI | | |
| | | LFHHILRVEPLLKIRSAGQKVQ | | |
| | | DCYFYQIFMEKNEKVGVPTIQQ | | |
| | | LLEWSFINSNLKFAEAPSCLII | | |
| | | QMPRFGKDFKLFKKIFPSLELN | | |
| | | ITDLLEDTPRQCRICGGLAMYE | | |
| | | CRECYDDPDISAGKIKQFCKTC | | |
| | | NTQVHLHPKRLNHKYNPVSLPK | | |
| | | DLPDWDWRHGCIPCQNMELFAV | | |
| | | LCIETSHYVAFVKYGKDDSAWL | | |
| | | FFDSMADRDGGQNGENIPQVTP | | |
| | | CPEVGEYLKMSLEDLHSLDSRR | | |
| | | IQGCARRLLCDAYMCMYQSPTM | | |
| | | SLYK | | |
| UBP16_HUMAN | 69 | MGKKRTKGKTVPIDDSSETLEP | 180 | ITVKGLSNLGNTCFFNAVMQ |
| Ubiquitin | | VCRHIRKGLEQGNLKKALVNVE | | NLSQTPVLRELLKEVKMSGT |
| carboxyl- | | WNICQDCKTDNKVKDKAEEETE | | IVKIEPPDLALTEPLEINLE |
| terminal | | EKPSVWLCLKCGHQGCGRNSQE | | PPGPLTLAMSQFLNEMQETK |
| hydrolase 16 | | QHALKHYLTPRSEPHCLVLSLD | | KGVVTPKELFSQVCKKAVRE |
| | | NWSVWCYVCDNEVQYCSSNQLG | | KGYQQQDSQELLRYLLDGMR |
| | | QVVDYVRKQASITTPKPAEKDN | | AEEHQRVSKGILKAFGNSTE |
| | | GNIELENKKLEKESKNEQEREK | | KLDEELKNKVKDYEKKKSMP |
| | | KENMAKENPPMNSPCQITVKGL | | SFVDRIFGGELTSMIMCDQC |
| | | SNLGNTCFFNAVMQNLSQTPVL | | RTVSLVHESFLDLSLPVLDD |
| | | RELLKEVKMSGTIVKIEPPDLA | | QSGKKSVNDKNLKKTVEDED |
| | | LTEPLEINLEPPGPLTLAMSQF | | QDSEEEKDNDSYIKERSDIP |
| | | LNEMQETKKGVVTPKELFSQVC | | SGTSKHLQKKAKKQAKKQAK |
| | | KKAVRFKGYQQQDS | | NQRRQQKIQGKVLHLNDICT |
| | | QELLRYLLDGMRAEEHQRVSKG | | IDHPEDSEYEAEMSLQGEVN |
| | | ILKAFGNSTEKLDEELKNKVKD | | IKSNHISQEGVMHKEYCVNQ |
| | | YEKKKSMPSFVDRIFGGELTSM | | KDLNGQAKMIESVTDNQKST |
| | | IMCDQCRTVSLVHESELDLSLP | | EEVDMKNINMDNDLEVLTSS |
| | | VLDDQSGKKSVNDKNLKKTVED | | PTRNLNGAYLTEGSNGEVDI |
| | | EDQDSEEEKDNDSYIKERSDIP | | SNGFKNLNLNAALHPDEINI |
| | | SGTSKHLQKKAKKQAKKQAKNQ | | EILNDSHTPGTKVYEVVNED |
| | | RRQQKIQGKVLHLNDICTIDHP | | PETAFCTLANREVENTDECS |
| | | EDSEYEAEMSLQGEVNIKSNHI | | IQHCLYQFTRNEKLRDANKL |
| | | SQEGVMHKEYCVNQKDLNGQAK | | LCEVCTRRQCNGPKANIKGE |
| | | MIESVTDNQKSTEEVDMKNINM | | RKHVYTNAKKQMLISLAPPV |
| | | DNDLEVLTSSPTRNLNGAYLTE | | LTLHLKRFQQAGFNLRKVNK |
| | | GSNGEVDISNGFKNLNLNAALH | | HIKFPEIL |
| | | PDEINIEILNDSHT | | DLAPFCTLKCKNVAEENTRV |
| | | PGTKVYEVVNEDPETAFCTLAN | | LYSLYGVVEHSGTMRSGHYT |
| | | REVENTDECSIQHCLYQFTRNE | | AYAKARTANSHLSNLVLHGD |
| | | KLRDANKLLCEVCTRRQCNGPK | | IPQDFEMESKGQWFHISDTH |
| | | ANIKGERKHVYTNAKKQMLISL | | VQAVPTTKVLNSQAYLLFYE |
| | | APPVLTLHLKRFQQAGENLRKV | | RIL |
| | | NKHIKFPEILDLAPFCTLKCKN | | |
| | | VAEENTRVLYSLYGVVEHSGTM | | |
| | | RSGHYTAYAKARTANSHLSNLV | | |
| | | LHGDIPQDFEMESKGQWFHISD | | |
| | | THVQAVPTTKVLNSQAYLLFYE | | |
| | | RIL | | |
| ALG13_HUMAN | 70 | MKCVFVTVGTTSEDDLIACVSA | 181 | YRYKDSLKEDIQKADLVISH |
| Putative | | PDSLQKIESLGYNRLILQIGRG | | AGAGSCLETLEKGKPLVVVI |
| bifunctional | | TVVPEPESTESFTLDVYRYKDS | | NEKLMNNHQLELAKQLHKEG |
| UDP-N- | | LKEDIQKADLVISHAGAGSCLE | | HLFYCTCRVLTCPGQAKSIA |
| acetyl- | | TLEKGKPLVVVINEKLMNNHQL | | SAPGKCQDSAALTSTAFSGL |
| glucosamine | | ELAKQLHKEGHLFYCTCRVLTC | | DFGLLSGYLHKQALVTATHP |
| transferase | | PGQAKSIASAPGKCQDSAALTS | | TCTLLFPSCHAFFPLPLTPT |
| and | | TAFSGLDFGLLSGYLHKQALVT | | LYKMHKGWKNYCSQKSLNEA |
| deubiquitinase | | ATHPTCTLLFPSCHAFFPLPLT | | SMDEYLGSLGLFRKLTAKDA |
| ALG13 | | PTLYKMHKGWKNYCSQKSLNEA | | SCLFRAISEQLFCSQVHHLE |
| | | SMDEYLGSLGLFRKLTAKDASC | | IRKACVSYMRENQQTFESYV |
| | | LFRAISEQLFCSQVHHLEIRKA | | EGSFEKYLERLGDPKESAGQ |
| | | CVSYMRENQQTFESYVEGSFEK | | LEIRALSLIYNRDFILYREP |
| | | YLERLGDPKESAGQ | | GKPPTYVTDNGYEDKILLCY |
| | | LEIRALSLIYNRDFILYREPGK | | SSSGHYDSVYS |
| | | PPTYVTDNGYEDKILLCYSSSG | | |
| | | HYDSVYSKQFQSSAAVCQAVLY | | |
| | | EILYKDVFVVDEEELKTAIKLF | | |
| | | RSGSKKNRNNAVTGSEDAHTDY | | |
| | | KSSNQNRMEEWGACYNAENIPE | | |
| | | GYNKGTEETKSPENPSKMPFPY | | |
| | | KVLKALDPEIYRNVEFDVWLDS | | |
| | | RKELQKSDYMEYAGRQYYLGDK | | |
| | | CQVCLESEGRYYNAHIQEVGNE | | |
| | | NNSVTVFIEELAEKHVVPLANL | | |
| | | KPVTQVMSVPAWNAMPSRKGRG | | |
| | | YQKMPGGYVPEIVISEMDIKQQ | | |
| | | KKMFKKIRGKEVYM | | |
| | | TMAYGKGDPLLPPRLQHSMHYG | | |
| | | HDPPMHYSQTAGNVMSNEHFHP | | |
| | | QHPSPRQGRGYGMPRNSSRFIN | | |
| | | RHNMPGPKVDFYPGPGKRCCQS | | |
| | | YDNESYRSRSFRRSHRQMSCVN | | |
| | | KESQYGFTPGNGQMPRGLEETI | | |
| | | TFYEVEEGDETAYPTLPNHGGP | | |
| | | STMVPATSGYCVGRRGHSSGKQ | | |
| | | TLNLEEGNGQSENGRYHEEYLY | | |
| | | RAEPDYETSGVYSTTASTANLS | | |
| | | LQDRKSCSMSPQDTVTSYNYPQ | | |
| | | KMMGNIAAVAASCANNVPAPVL | | |
| | | SNGAAANQAISTTSVSSQNAIQ | | |
| | | PLFVSPPTHGRPVI | | |
| | | ASPSYPCHSAIPHAGASLPPPP | | |
| | | PPPPPPPPPPPPPPPPPPPPPP | | |
| | | PALDVGETSNLQPPPPLPPPPY | | |
| | | SCDPSGSDLPQDTKVLQYYENL | | |
| | | GLQCYYHSYWHSMVYVPQMQQQ | | |
| | | LHVENYPVYTEPPLVDQTVPQC | | |
| | | YSEVRREDGIQAEASANDTEPN | | |
| | | ADSSSVPHGAVYYPVMSDPYGQ | | |
| | | PPLPGEDSCLPVVPDYSCVPPW | | |
| | | HPVGTAYGGSSQIHGAINPGPI | | |
| | | GCIAPSPPASHYVPQGM | | |
| OTU1_HUMAN | 71 | MFGPAKGRHFGVHPAPGFPGGV | 182 | QGLSSRTRVRELQGQIAAIT |
| Ubiquitin | | SQQAAGTKAGPAGAWPVGSRTD | | GIAPGGQRILVGYPPECLDL |
| thioesterase | | TMWRLRCKAKDGTHVLQGLSSR | | SNGDTILEDLPIQSGDMLII |
| OTU1 | | TRVRELQGQIAAITGIAPGGQR | | EEDQTRPRSSPAFTKRGASS |
| | | ILVGYPPECLDLSNGDTILEDL | | YVRETLPVLTRTVVPADNSC |
| | | PIQSGDMLIIEEDQTRPRSSPA | | LETSVYYVVEGGVLNPACAP |
| | | FTKRGASSYVRETLPVLTRTVV | | EMRRLIAQIVASDPDFYSEA |
| | | PADNSCLFTSVYYVVEGGVLNP | | ILGKTNQEYCDWIKRDDTWG |
| | | ACAPEMRRLIAQIVASDPDFYS | | GAIEISILSKFYQCEICVVD |
| | | EAILGKTNQEYCDWIKRDDTWG | | TQTVRIDRFGEDAGYTKRVL |
| | | GAIEISILSKFYQCEICVVDTQ | | LIYDGIHYDPLQ |
| | | TVRIDRFGEDAGYTKRVLLIYD | | |
| | | GIHYDPLQRNFPDPDTPPLTIF | | |
| | | SSNDDIVLVQALELADEARRRR | | |
| | | QFTDVNRFTLRCMVCQKGLTGQ | | |
| | | AEAREHAKETGHTNEGEV | | |
| OTUD1_HUMAN | 72 | MQLYSSVCTHYPAGAPGPTAAA | 183 | HREAAAVPAAKMPAFSSCFE |
| OTU | | PAPPAAATPFKVSLQPPGAAGA | | VVSGAAAPASAAAGPPGASC |
| domain- | | APEPETGECQPAAAAEHREAAA | | KPPLPPHYTSTAQITVRALG |
| containing | | VPAAKMPAFSSCFEVVSGAAAP | | ADRLLLHGPDPVPGAAGSAA |
| protein 1 | | ASAAAGPPGASCKPPLPPHYTS | | APRGRCLLLAPAPAAPVPPR |
| | | TAQITVRALGADRLLLHGPDPV | | RGSSAWLLEELLRPDCPEPA |
| | | PGAAGSAAAPRGRCLLLAPAPA | | GLDATREGPDRNFRLSEHRQ |
| | | APVPPRRGSSAWLLEELLRPDC | | ALAAAKHRGPAATPGSPDPG |
| | | PEPAGLDATREGPDRNERLSEH | | PGPWGEEHLAERGPRGWERG |
| | | RQALAAAKHRGPAATPGSPDPG | | GDRCDAPGGDAARRPDPEAE |
| | | PGPWGEEHLAERGPRGWERGGD | | APPAGSIEAAPSSAAEPVIV |
| | | RCDAPGGDAARRPDPEAEAPPA | | SRSDPRDEKLALYLAEVEKQ |
| | | GSIEAAPSSAAEPVIVSRSDPR | | DKYLRQRNKYRFHIIPDGNC |
| | | DEKLALYLAEVEKQ | | LYRAVSKTVYGDQSLHRELR |
| | | DKYLRQRNKYRFHIIPDGNCLY | | EQTVHYIADHLDHFSPLIEG |
| | | RAVSKTVYGDQSLHRELREQTV | | DVGEFIIAAAQDGAWAGYPE |
| | | HYIADHLDHFSPLIEGDVGEFI | | LLAMGQMLNVNIHLTTGGRL |
| | | IAAAQDGAWAGYPELLAMGQML | | ESPTVSTMIHYLGPEDSLRP |
| | | NVNIHLTTGGRLESPTVSTMIH | | SIWLSWLSNGHYDAV |
| | | YLGPEDSLRPSIWLSWLSNGHY | | |
| | | DAVEDHSYPNPEYDNWCKQTQV | | |
| | | QRKRDEELAKSMAISLSKMYIE | | |
| | | QNACS | | |
| OTU6B_HUMAN | 73 | MEAVLTEELDEEEQLLRRHRKE | 184 | QKHREELEQLKLTTKENKID |
| Deubiquitinase | | KKELQAKIQGMKNAVPKNDKKR | | SVAVNISNLVLENQPPRISK |
| OTUD6B | | RKQLTEDVAKLEKEMEQKHREE | | AQKRREKKAALEKEREERIA |
| | | LEQLKLTTKENKIDSVAVNISN | | EAEIENLTGARHMESEKLAQ |
| | | LVLENQPPRISKAQKRREKKAA | | ILAARQLEIKQIPSDGHCMY |
| | | LEKEREERIAEAEIENLTGARH | | KAIEDQLKEKDCALTVVALR |
| | | MESEKLAQILAARQLEIKQIPS | | SQTAEYMQSHVEDELPELTN |
| | | DGHCMYKAIEDQLKEKDCALTV | | PNTGDMYTPEEFQKYCEDIV |
| | | VALRSQTAEYMQSHVEDELPFL | | NTAAWGGQLELRALSHILQT |
| | | TNPNTGDMYTPEEFQKYCEDIV | | PIEIIQADSPPIIVGEEYSK |
| | | NTAAWGGQLELRALSHILQTPI | | KPLILVYMRHAYG |
| | | EIIQADSPPIIVGEEYSKKPLI | | |
| | | LVYMRHAYGLGEHYNSVTRLVN | | |
| | | IVTENCS | | |
| OTU6A_HUMAN | 74 | MDDPKSEQQRILRRHQRERQEL | 185 | QELEKFQDDSSIESVVEDLA |
| OTU | | QAQIRSLKNSVPKTDKTKRKQL | | KMNLENRPPRSSKAHRKRER |
| domain- | | LQDVARMEAEMAQKHRQELEKF | | MESEERERQESIFQAEMSEH |
| containing | | QDDSSIESVVEDLAKMNLENRP | | LAGFKREEEEKLAAILGARG |
| protein 6A | | PRSSKAHRKRERMESEERERQE | | LEMKAIPADGHCMYRAIQDQ |
| | | SIFQAEMSEHLAGFKREEEEKL | | LVFSVSVEMLRCRTASYMKK |
| | | AAILGARGLEMKAIPADGHCMY | | HVDEFLPFFSNPETSDSFGY |
| | | RAIQDQLVFSVSVEMLRCRTAS | | DDFMIYCDNIVRTTAWGGQL |
| | | YMKKHVDEFLPFFSNPETSDSF | | ELRALSHVLKTPIEVIQADS |
| | | GYDDFMIYCDNIVRTTAWGGQL | | PTLIIGEEYVKKPIILVYLR |
| | | ELRALSHVLKTPIEVIQADSPT | | YAYS |
| | | LIIGEEYVKKPIILVYLRYAYS | | |
| | | LGEHYNSVTPLEAGAAGGVLPR | | |
| | | LL | | |
| OTUB1_HUMAN | 75 | MAAEEPQQQKQEPLGSDSEGVN | 75 | MAAEEPQQQKQEPLGSDSEG |
| Ubiquitin | | CLAYDEAIMAQQDRIQQEIAVQ | | VNCLAYDEAIMAQQDRIQQE |
| thioesterase | | NPLVSERLELSVLYKEYAEDDN | | IAVQNPLVSERLELSVLYKE |
| OTUB1 | | IYQQKIKDLHKKYSYIRKTRPD | | YAEDDNIYQQKIKDLHKKYS |
| | | GNCFYRAFGFSHLEALLDDSKE | | YIRKTRPDGNCFYRAFGESH |
| | | LQRFKAVSAKSKEDLVSQGFTE | | LEALLDDSKELQRFKAVSAK |
| | | FTIEDFHNTFMDLIEQVEKQTS | | SKEDLVSQGFTEFTIEDFHN |
| | | VADLLASENDQSTSDYLVVYLR | | TFMDLIEQVEKQTSVADLLA |
| | | LLTSGYLQRESKFFEHFIEGGR | | SENDQSTSDYLVVYLRLLTS |
| | | TVKEFCQQEVEPMCKESDHIHI | | GYLQRESKFFEHFIEGGRTV |
| | | IALAQALSVSIQVEYMDRGEGG | | KEFCQQEVEPMCKESDHIHI |
| | | TTNPHIFPEGSEPKVYLLYRPG | | IALAQALSVSIQVEYMDRGE |
| | | HYDILYK | | GGTTNPHIFPEGSEPKVYLL |
| | | | | YRPGHYDILYK |
| OTU7A_HUMAN | 76 | MVSSVLPNPTSAECWAALLHDP | 186 | SDYEQLRQVHTANLPHVENE |
| OTU | | MTLDMDAVLSDFVRSTGAEPGL | | GRGPKQPEREPQPGHKVERP |
| domain- | | ARDLLEGKNWDLTAALSDYEQL | | CLQRQDDIAQEKRLSRGISH |
| containing | | RQVHTANLPHVENEGRGPKQPE | | ASSAIVSLARSHVASECNNE |
| protein 7A | | REPQPGHKVERPCLQRQDDIAQ | | QFPLEMPIYTFQLPDLSVYS |
| | | EKRLSRGISHASSAIVSLARSH | | EDERSFIERDLIEQATMVAL |
| | | VASECNNEQFPLEMPIYTFQLP | | EQAGRLNWWSTVCTSCKRLL |
| | | DLSVYSEDERSFIERDLIEQAT | | PLATTGDGNCLLHAASLGMW |
| | | MVALEQAGRLNWWSTVCTSCKR | | GFHDRDLVLRKALYTMMRTG |
| | | LLPLATTGDGNCLLHAASLGMW | | AEREALKRRWRWQQTQQNKE |
| | | GFHDRDLVLRKALYTMMRTGAE | | EEWEREWTELLKLASSEPRT |
| | | REALKRRWRWQQTQQNKEEEWE | | HFSKNGGTGGGVDNSEDPVY |
| | | REWTELLKLASSEPRTHESKNG | | ESLEEFHVEVLAHILRRPIV |
| | | GTGGGVDNSEDPVY | | VVADTMLRDSGGEAFAPIPE |
| | | ESLEEFHVEVLAHILRRPIVVV | | GGIYLPLEVPPNRCHCSPLV |
| | | ADTMLRDSGGEAFAPIPEGGIY | | LAYDQAHFSAL |
| | | LPLEVPPNRCHCSPLVLAYDQA | | |
| | | HFSALVSMEQRDQQREQAVIPL | | |
| | | TDSEHKLLPLHFAVDPGKDWEW | | |
| | | GKDDNDNARLAHLILSLEAKLN | | |
| | | LLHSYMNVTWIRIPSETRAPLA | | |
| | | QPESPTASAGEDVQSLADSLDS | | |
| | | DRDSVCSNSNSNNGKNGKDKEK | | |
| | | EKQRKEKDKTRADSVANKLGSF | | |
| | | SKTLGIKLKKNMGGLGGLVHGK | | |
| | | MGRANSANGKNGDSAERGKEKK | | |
| | | AKSRKGSKEESGASASTSPSEK | | |
| | | TTPSPTDKAAGASP | | |
| | | AEKGGGPRGDAWKYSTDVKLSL | | |
| | | NILRAAMQGERKFIFAGLLLTS | | |
| | | HRHQFHEEMIGYYLTSAQERES | | |
| | | AEQEQRRRDAATAAAAAAAAAA | | |
| | | ATAKRPPRRPETEGVPVPERAS | | |
| | | PGPPTQLVLKLKERPSPGPAAG | | |
| | | RAARAAAGGTASPGGGARRASA | | |
| | | SGPVPGRSPPAPARQSVIHVQA | | |
| | | SGARDEACAPAVGALRPCATYP | | |
| | | QQNRSLSSQSYSPARAAALRTV | | |
| | | NTVESLARAVPGALPGAAGTAG | | |
| | | AAEHKSQTYTNGFGALRDGLEF | | |
| | | ADADAPTARSNGECGRGGPGPV | | |
| | | QRRCQRENCAFYGRAETEHYCS | | |
| | | YCYREELRRRREARGARP | | |
| OTUD4MAN_HU | 77 | MEAAVGVPDGGDQGGAGPREDA | 187 | MEAAVGVPDGGDQGGAGPRE |
| OTU | | TPMDAYLRKLGLYRKLVAKDGS | | DATPMDAYLRKLGLYRKLVA |
| domain- | | CLFRAVAEQVLHSQSRHVEVRM | | KDGSCLFRAVAEQVLHSQSR |
| containing | | ACIHYLRENREKFEAFIEGSFE | | HVEVRMACIHYLRENREKFE |
| protein 4 | | EYLKRLENPQEWVGQVEISALS | | AFIEGSFEEYLKRLENPQEW |
| | | LMYRKDFIIYREPNVSPSQVTE | | VGQVEISALSLMYRKDFIIY |
| | | NNFPEKVLLCESNGNHYDIVYP | | REPNVSPSQVTENNFPEKVL |
| | | IKYKESSAMCQSLLYELLYEKV | | LCFSNGNHYDIVYP |
| | | FKTDVSKIVMELDTLEVADEDN | | |
| | | SEISDSEDDSCKSKTAAAAADV | | |
| | | NGFKPLSGNEQLKNNGNSTSLP | | |
| | | LSRKVLKSLNPAVYRNVEYEIW | | |
| | | LKSKQAQQKRDYSIAAGLQYEV | | |
| | | GDKCQVRLDHNGKF | | |
| | | LNADVQGIHSENGPVLVEELGK | | |
| | | KHTSKNLKAPPPESWNTVSGKK | | |
| | | MKKPSTSGQNFHSDVDYRGPKN | | |
| | | PSKPIKAPSALPPRLQHPSGVR | | |
| | | QHAFSSHSSGSQSQKFSSEHKN | | |
| | | LSRTPSQIIRKPDRERVEDEDH | | |
| | | TSRESNYFGLSPEERREKQAIE | | |
| | | ESRLLYEIQNRDEQAFPALSSS | | |
| | | SVNQSASQSSNPCVQRKSSHVG | | |
| | | DRKGSRRRMDTEERKDKDSIHG | | |
| | | HSQLDKRPEPSTLENITDDKYA | | |
| | | TVSSPSKSKKLECPSPAEQKPA | | |
| | | EHVSLSNPAPLLVSPEVHLTPA | | |
| | | VPSLPATVPAWPSE | | |
| | | PTTFGPTGVPAPIPVLSVTQTL | | |
| | | TTGPDSAVSQAHLTPSPVPVSI | | |
| | | QAVNQPLMPLPQTLSLYQDPLY | | |
| | | PGFPCNEKGDRAIVPPYSLCQT | | |
| | | GEDLPKDKNILRFFENLGVKAY | | |
| | | SCPMWAPHSYLYPLHQAYLAAC | | |
| | | RMYPKVPVPVYPHNPWFQEAPA | | |
| | | AQNESDCTCTDAHFPMQTEASV | | |
| | | NGQMPQPEIGPPTFSSPLVIPP | | |
| | | SQVSESHGQLSYQADLESETPG | | |
| | | QLLHADYEESLSGKNMFPQSFG | | |
| | | PNPFLGPVPIAPPFFPHVWYGY | | |
| | | PFQGFIENPVMRQNIVLPSDEK | | |
| | | GELDLSLENLDLS | | |
| | | KDCGSVSTVDEFPEARGEHVHS | | |
| | | LPEASVSSKPDEGRTEQSSQTR | | |
| | | KADTALASIPPVAEGKAHPPTQ | | |
| | | ILNRERETVPVELEPKRTIQSL | | |
| | | KEKTEKVKDPKTAADVVSPGAN | | |
| | | SVDSRVQRPKEESSEDENEVSN | | |
| | | ILRSGRSKQFYNQTYGSRKYKS | | |
| | | DWGYSGRGGYQHVRSEESWKGQ | | |
| | | PSRSRDEGYQYHRNVRGRPFRG | | |
| | | DRRRSGMGDGHRGQHT | | |
| OTUB2_HUMAN | 78 | MSETSFNLISEKCDILSILRDH | 78 | MSETSENLISEKCDILSILR |
| Ubiquitin | | PENRIYRRKIEELSKRFTAIRK | | DHPENRIYRRKIEELSKRET |
| thioesterase | | TKGDGNCFYRALGYSYLESLLG | | AIRKTKGDGNCFYRALGYSY |
| OTUB2 | | KSREIFKFKERVLQTPNDLLAA | | LESLLGKSREIFKFKERVLQ |
| | | GFEEHKERNFFNAFYSVVELVE | | TPNDLLAAGFEEHKERNFEN |
| | | KDGSVSSLLKVENDQSASDHIV | | AFYSVVELVEKDGSVSSLLK |
| | | QFLRLLTSAFIRNRADFFRHFI | | VENDQSASDHIVQFLRLLTS |
| | | DEEMDIKDFCTHEVEPMATECD | | AFIRNRADFFRHFIDEEMDI |
| | | HIQITALSQALSIALQVEYVDE | | KDFCTHEVEPMATECDHIQI |
| | | MDTALNHHVFPEAATPSVYLLY | | TALSQALSIALQVEYVDEMD |
| | | KTSHYNILYAADKH | | TALNHHVFPEAATPSVYLLY |
| | | | | KTSHYNILYAADKH |
| OTUD3_HUMAN | 79 | MSRKQAAKSRPGSGSRKAEAER | 188 | MSRKQAAKSRPGSGSRKAEA |
| OTU | | KRDERAARRALAKERRNRPESG | | ERKRDERAARRALAKERRNR |
| domain- | | GGGGCEEEFVSFANQLQALGLK | | PESGGGGGCEEEFVSFANQL |
| containing | | LREVPGDGNCLFRALGDQLEGH | | QALGLKLREVPGDGNCLFRA |
| protein 3 | | SRNHLKHRQETVDYMIKQREDE | | LGDQLEGHSRNHLKHRQETV |
| | | EPFVEDDIPFEKHVASLAKPGT | | DYMIKQREDFEPFVEDDIPE |
| | | FAGNDAIVAFARNHQLNVVIHQ | | EKHVASLAKPGTFAGNDAIV |
| | | LNAPLWQIRGTEKSSVRELHIA | | AFARNHQLNVVIHQLNAPLW |
| | | YRYGEHYDSVRRINDNSEAPAH | | QIRGTEKSSVRELHIAYRYG |
| | | LQTDFQMLHQDESNKREKIKTK | | EHYDSVRR |
| | | GMDSEDDLRDEVEDAVQKVCNA | | |
| | | TGCSDENLIVQNLEAENYNIES | | |
| | | AIIAVLRMNQGKRNNAEENLEP | | |
| | | SGRVLKQCGPLWEE | | |
| | | GGSGARIFGNQGLNEGRTENNK | | |
| | | AQASPSEENKANKNQLAKVTNK | | |
| | | QRREQQWMEKKKRQEERHRHKA | | |
| | | LESRGSHRDNNRSEAEANTQVT | | |
| | | LVKTFAALNI | | |
| OTU7B_HUMAN | 80 | MTLDMDAVLSDFVRSTGAEPGL | 189 | MTLDMDAVLSDFVRSTGAEP |
| OTU | | ARDLLEGKNWDVNAALSDFEQL | | GLARDLLEGKNWDVNAALSD |
| domain- | | RQVHAGNLPPSFSEGSGGSRTP | | FEQLRQVHAGNLPPSESEGS |
| containing | | EKGESDREPTRPPRPILQRQDD | | GGSRTPEKGFSDREPTRPPR |
| protein 7B | | IVQEKRLSRGISHASSSIVSLA | | PILQRQDDIVQEKRLSRGIS |
| (Also referred | | RSHVSSNGGGGGSNEHPLEMPI | | HASSSIVSLARSHVSSNGGG |
| to herein as | | CAFQLPDLTVYNEDERSFIERD | | GGSNEHPLEMPICAFQLPDL |
| Cezanne) | | LIEQSMLVALEQAGRLNWWVSV | | TVYNEDERSFIERDLIEQSM |
| | | DPTSQRLLPLATTGDGNCLLHA | | LVALEQAGRLNWWVSVDPTS |
| | | ASLGMWGFHDRDLMLRKALYAL | | QRLLPLATTGDGNCLLHAAS |
| | | MEKGVEKEALKRRWRWQQTQQN | | LGMWGFHDRDLMLRKALYAL |
| | | KESGLVYTEDEWQKEWNELIKL | | MEKGVEKEALKRRWRWQQTQ |
| | | ASSEPRMHLGTNGANCGGVESS | | QNKESGLVYTEDEWQKEWNE |
| | | EEPVYESLEEFHVEVLAHVLRR | | LIKLASSEPRMHLGTNGANC |
| | | PIVVVADTMLRDSGGEAFAPIP | | GGVESSEEPVYESLEEFHVE |
| | | FGGIYLPLEVPASQCHRSPLVL | | VLAHVLRRPIVVVADTMLRD |
| | | AYDQAHFSALVSMEQKENTKEQ | | SGGEAFAPIPEGGIYLPLEV |
| | | AVIPLTDSEYKLLPLHFAVDPG | | PASQCHRSPLVLAYDQAHES |
| | | KGWEWGKDDSDNVRLASVILSL | | AL |
| | | EVKLHLLHSYMNVKWIPLSSDA | 423 | PPSFSEGSGGSRTPEKGESD |
| | | QAPLAQPESPTASAGDEPRSTP | | REPTRPPRPILQRQDDIVQE |
| | | ESGDSDKESVGSSSTSNEGGRR | | KRLSRGISHASSSIVSLARS |
| | | KEKSKRDREKDKKRADSVANKL | | HVSSNGGGGGSNEHPLEMPI |
| | | GSFGKTLGSKLKKNMGGLMHSK | | CAFQLPDLTVYNEDERSFIE |
| | | GSKPGGVGTGLGGSSGTETLEK | | RDLIEQSMLVALEQAGRLNW |
| | | KKKNSLKSWKGGKEEAAGDGPV | | WVSVDPTSQRLLPLATTGDG |
| | | SEKPPAESVGNGGSKYSQEVMQ | | NCLLHAASLGMWGFHDRDLM |
| | | SLSILRTAMQGEGKFIFVGTLK | | LRKALYALMEKGVEKEALKR |
| | | MGHRHQYQEEMIQRYLSDAEER | | RWRWQQTQQNKESGLVYTED |
| | | FLAEQKQKEAERKIMNGGIGGG | | EWQKEWNELIKLASSEPRMH |
| | | PPPAKKPEPDAREEQPTGPPAE | | LGTNGANCGGVESSEEPVYE |
| | | SRAMAFSTGYPGDFTIPRPSGG | | SLEEFHVFVLAHVLRRPIVV |
| | | GVHCQEPRRQLAGGPCVGGLPP | | VADTMLRDSGGEAFAPIPFG |
| | | YATFPRQCPPGRPYPHQDSIPS | | GIYLPLEVPASQCHRSPLVL |
| | | LEPGSHSKDGLHRGALLPPPYR | | AYDQAHFSALVSMEQKENTK |
| | | VADSYSNGYREPPEPDGWAGGL | | EQAVIPLTDSEYKLLPLHFA |
| | | RGLPPTQTKCKQPNCSFYGHPE | | VDPGKGWEWGKDDSDNVRLA |
| | | TNNFCSCCYREELRRREREPDG | | SVILSLEVKLHLLHSYMNVK |
| | | ELLVHRE | | WIPLSSDAQAPLAQ |
| OTUD5_HUMAN | 81 | MTILPKKKPPPPDADPANEPPP | 190 | MTILPKKKPPPPDADPANEP |
| OTU | | PGPMPPAPRRGGGVGVGGGGTG | | PPPGPMPPAPRRGGGVGVGG |
| domain- | | VGGGDRDRDSGVVGARPRASPP | | GGTGVGGGDRDRDSGVVGAR |
| containing | | PQGPLPGPPGALHRWALAVPPG | | PRASPPPQGPLPGPPGALHR |
| protein 5 | | AVAGPRPQQASPPPCGGPGGPG | | WALAVPPGAVAGPRPQQASP |
| | | GGPGDALGAAAAGVGAAGVVVG | | PPCGGPGGPGGGPGDALGAA |
| | | VGGAVGVGGCCSGPGHSKRRRQ | | AAGVGAAGVVVGVGGAVGVG |
| | | APGVGAVGGGSPEREEVGAGYN | | GCCSGPGHSKRRRQAPGVGA |
| | | SEDEYEAAAARIEAMDPATVEQ | | VGGGSPEREEVGAGYNSEDE |
| | | QEHWFEKALRDKKGFIIKQMKE | | YEAAAARIEAMDPATVEQQE |
| | | DGACLFRAVADQVYGDQDMHEV | | HWFEKALRDKKGFIIKQMKE |
| | | VRKHCMDYLMKNADYFSNYVTE | | DGACLFRAVADQVYGDQDMH |
| | | DFTTYINRKRKNNCHGNHIEMQ | | EVVRKHCMDYLMKNADYFSN |
| | | AMAEMYNRPVEVYQ | | YVTEDFTTYINRKRKNNCHG |
| | | YSTGTSAVEPINTFHGIHQNED | | NHIEMQAMAEMYNRPVEVYQ |
| | | EPIRVSYHRNIHYNSVVNPNKA | | YSTGTSAVEPINTFHGIHQN |
| | | TIGVGLGLPSFKPGFAEQSLMK | | EDEPIRVSYHRNIHYNSV |
| | | NAIKTSEESWIEQQMLEDKKRA | | |
| | | TDWEATNEAIEEQVARESYLQW | | |
| | | LRDQEKQARQVRGPSQPRKASA | | |
| | | TCSSATAAASSGLEEWTSRSPR | | |
| | | QRSSASSPEHPELHAELGMKPP | | |
| | | SPGTVLALAKPPSPCAPGTSSQ | | |
| | | FSAGADRATSPLVSLYPALECR | | |
| | | ALIQQMSPSAFGLNDWDDDEIL | | |
| | | ASVLAVSQQEYLDSMKKNKVHR | | |
| | | DPPPDKS | | |
| TNAP3_HUMAN | 82 | MAEQVLPQALYLSNMRKAVKIR | 191 | MAEQVLPQALYLSNMRKAVK |
| Tumor | | ERTPEDIFKPTNGIIHHFKTMH | | IRERTPEDIFKPTNGIIHHF |
| necrosis factor | | RYTLEMFRTCQFCPQFREIIHK | | KTMHRYTLEMFRTCQFCPQF |
| alpha-induced | | ALIDRNIQATLESQKKLNWCRE | | REIIHKALIDRNIQATLESQ |
| protein 3 | | VRKLVALKINGDGNCLMHATSQ | | KKLNWCREVRKLVALKINGD |
| | | YMWGVQDTDLVLRKALFSTLKE | | GNCLMHATSQYMWGVQDTDL |
| | | TDTRNFKFRWQLESLKSQEFVE | | VLRKALFSTLKETDTRNEKF |
| | | TGLCYDTRNWNDEWDNLIKMAS | | RWQLESLKSQEFVETGLCYD |
| | | TDTPMARSGLQYNSLEEIHIFV | | TRNWNDEWDNLIKMASTDTP |
| | | LCNILRRPIIVISDKMLRSLES | | MARSGLQYNSLEEIHIFVLC |
| | | GSNFAPLKVGGIYLPLHWPAQE | | NILRRPIIVISDKMLRSLES |
| | | CYRYPIVLGYDSHHFVPLVTLK | | GSNFAPLKVGGIYLPLHWPA |
| | | DSGPEIRAVPLVNRDRGRFEDL | | QECYRYPIVLGYDSHHFVPL |
| | | KVHELTDPENEMKE | | |
| | | KLLKEYLMVIEIPVQGWDHGTT | | |
| | | HLINAAKLDEANLPKEINLVDD | | |
| | | YFELVQHEYKKWQENSEQGRRE | | |
| | | GHAQNPMEPSVPQLSLMDVKCE | | |
| | | TPNCPFFMSVNTQPLCHECSER | | |
| | | RQKNQNKLPKLNSKPGPEGLPG | | |
| | | MALGASRGEAYEPLAWNPEEST | | |
| | | GGPHSAPPTAPSPFLESETTAM | | |
| | | KCRSPGCPFTLNVQHNGFCERC | | |
| | | HNARQLHASHAPDHTRHLDPGK | | |
| | | CQACLQDVTRTENGICSTCFKR | | |
| | | TTAEASSSLSTSLPPSCHQRSK | | |
| | | SDPSRLVRSPSPHSCHRAGNDA | | |
| | | PAGCLSQAARTPGD | | |
| | | RTGTSKCRKAGCVYFGTPENKG | | |
| | | FCTLCFIEYRENKHFAAASGKV | | |
| | | SPTASRFQNTIPCLGRECGTLG | | |
| | | STMFEGYCQKCFIEAQNQREHE | | |
| | | AKRTEEQLRSSQRRDVPRTTQS | | |
| | | TSRPKCARASCKNILACRSEEL | | |
| | | CMECQHPNQRMGPGAHRGEPAP | | |
| | | EDPPKQRCRAPACDHEGNAKCN | | |
| | | GYCNECFQFKQMYG | | |
| ZRAN1_HUMAN | 83 | MSERGIKWACEYCTYENWPSAI | 192 | MSERGIKWACEYCTYENWPS |
| Ubiquitin | | KCTMCRAQRPSGTIITEDPFKS | | AIKCTMCRAQRPSGTIITED |
| thioesterase | | GSSDVGRDWDPSSTEGGSSPLI | | PFKSGSSDVGRDWDPSSTEG |
| ZRANB1 | | CPDSSARPRVKSSYSMENANKW | | GSSPLICPDSSARPRVKSSY |
| | | SCHMCTYLNWPRAIRCTQCLSQ | | SMENANKWSCHMCTYLNWPR |
| | | RRTRSPTESPQSSGSGSRPVAF | | AIRCTQCLSQRRTRSPTESP |
| | | SVDPCEEYNDRNKLNTRTQHWT | | QSSGSGSRPVAFSVDPCEEY |
| | | CSVCTYENWAKAKRCVVCDHPR | | NDRNKLNTRTQHWTCSVCTY |
| | | PNNIEAIELAETEEASSIINEQ | | ENWAKAKRCVVCDHPRPNNI |
| | | DRARWRGSCSSGNSQRRSPPAT | | EAIELAETEEASSIINEQDR |
| | | KRDSEVKMDFQRIELAGAVGSK | | ARWRGSCSSGNSQRRSPPAT |
| | | EELEVDFKKLKQIKNRMKKTDW | | KRDSEVKMDFQRIELAGAVG |
| | | LFLNACVGVVEGDLAAIEAYKS | | SKEELEVDEKKLKQIKNRMK |
| | | SGGDIARQLTADEV | | KTDWLFLNACVGVVEGDLAA |
| | | RLLNRPSAFDVGYTLVHLAIRE | | IEAYKSSGGDIARQLTADEV |
| | | QRQDMLAILLTEVSQQAAKCIP | | RLLNRPSAFDVGYTLVHLAI |
| | | AMVCPELTEQIRREIAASLHQR | | RFQRQDMLAILLTEVSQQAA |
| | | KGDFACYFLTDLVTFTLPADIE | | KCIPAMVCPELTEQIRREIA |
| | | DLPPTVQEKLFDEVLDRDVQKE | | ASLHQRKGDFACYFLTDLVT |
| | | LEEESPIINWSLELATRLDSRL | | FTLPADIEDLPPTVQEKLED |
| | | YALWNRTAGDCLLDSVLQATWG | | EVLDRDVQKELEEESPIINW |
| | | IYDKDSVLRKALHDSLHDCSHW | | SLELATRLDSRLYALWNRTA |
| | | FYTRWKDWESWYSQSFGLHESL | | GDCLLDSVLQATWGIYDKDS |
| | | REEQWQEDWAFILSLASQPGAS | | VLRKALHDSLHDCSHWFYTR |
| | | LEQTHIFVLAHILRRPIIVYGV | | WKDWESWYSQSFGLHESLRE |
| | | KYYKSFRGETLGYTRFQGVYLP | | EQWQEDWAFILSLASQPGAS |
| | | LLWEQSFCWKSPIALGYTRGHF | | LEQTHIFVLAHILRRPIIVY |
| | | SALVAMENDGYGNR | | GVKYYKSFRGETLGYTRFQG |
| | | GAGANLNTDDDVTITELPLVDS | | VYLPLLWEQSFCWKSPIALG |
| | | ERKLLHVHELSAQELGNEEQQE | | YTRGHESAL |
| | | KLLREWLDCCVTEGGVLVAMQK | | |
| | | SSRRRNHPLVTQMVEKWLDRYR | | |
| | | QIRPCTSLSDGEEDEDDEDE | | |
| VCIP1_HUMAN | 84 | MSQPPPPPPPLPPPPPPPEAPQ | 193 | PASGSVSIECTECGQRHEQQ |
| Deubiquitinating | | TPSSLASAAASGGLLKRRDRRI | | QLLGVEEVTDPDVVLHNLLR |
| protein | | LSGSCPDPKCQARLFFPASGSV | | NALLGVTGAPKKNTELVKVM |
| VCIP135 | | SIECTECGQRHEQQQLLGVEEV | | GLSNYHCKLLSPILARYGMD |
| | | TDPDVVLHNLLRNALLGVTGAP | | KQTGRAKLLRDMNQGELEDC |
| | | KKNTELVKVMGLSNYHCKLLSP | | ALLGDRAFLIEPEHVNTVGY |
| | | ILARYGMDKQTGRAKLLRDMNQ | | GKDRSGSLLYLHDTLEDIKR |
| | | GELFDCALLGDRAFLIEPEHVN | | ANKSQECLIPVHVDGDGHCL |
| | | TVGYGKDRSGSLLYLHDTLEDI | | VHAVSRALVGRELFWHALRE |
| | | KRANKSQECLIPVHVDGDGHCL | | NLKQHFQQHLARYQALFHDE |
| | | VHAVSRALVGRELFWHALRENL | | IDAAEWEDIINECDPLFVPP |
| | | KQHFQQHLARYQALFHDFIDAA | | EGVPLGLRNIHIFGLANVLH |
| | | EWEDIINECDPLFVPPEGVPLG | | RPIILLDSLSGMRSSGDYSA |
| | | LRNIHIFGLANVLH | | TFLPGLIPAEKCTGKDGHLN |
| | | RPIILLDSLSGMRSSGDYSATE | | KPICIAWSSSGRNHYIPL |
| | | LPGLIPAEKCTGKDGHLNKPIC | | |
| | | IAWSSSGRNHYIPLVGIKGAAL | | |
| | | PKLPMNLLPKAWGVPQDLIKKY | | |
| | | IKLEEDGGCVIGGDRSLQDKYL | | |
| | | LRLVAAMEEVEMDKHGIHPSLV | | |
| | | ADVHQYFYRRTGVIGVQPEEVT | | |
| | | AAAKKAVMDNRLHKCLLCGALS | | |
| | | ELHVPPEWLAPGGKLYNLAKST | | |
| | | HGQLRTDKNYSFPLNNLVCSYD | | |
| | | SVKDVLVPDYGMSNLTACNWCH | | |
| | | GTSVRKVRGDGSIVYLDGDRTN | | |
| | | SRSTGGKCGCGFKHFWDGKEYD | | |
| | | NLPEAFPITLEWGG | | |
| | | RVVRETVYWFQYESDSSLNSNV | | |
| | | YDVAMKLVTKHEPGEFGSEILV | | |
| | | QKVVHTILHQTAKKNPDDYTPV | | |
| | | NIDGAHAQRVGDVQGQESESQL | | |
| | | PTKIILTGQKTKTLHKEELNMS | | |
| | | KTERTIQQNITEQASVMQKRKT | | |
| | | EKLKQEQKGQPRTVSPSTIRDG | | |
| | | PSSAPATPTKAPYSPTTSKEKK | | |
| | | IRITTNDGRQSMVTLKSSTTFF | | |
| | | ELQESIAREFNIPPYLQCIRYG | | |
| | | FPPKELMPPQAGMEKEPVPLQH | | |
| | | GDRITIEILKSKAEGGQSAAAH | | |
| | | SAHTVKQEDIAVTGKLSSKELQ | | |
| | | EQAEKEMYSLCLLA | | |
| | | TLMGEDVWSYAKGLPHMFQQGG | | |
| | | VFYSIMKKTMGMADGKHCTFPH | | |
| | | LPGKTFVYNASEDRLELCVDAA | | |
| | | GHFPIGPDVEDLVKEAVSQVRA | | |
| | | EATTRSRESSPSHGLLKLGSGG | | |
| | | VVKKKSEQLHNVTAFQGKGHSL | | |
| | | GTASGNPHLDPRARETSVVRKH | | |
| | | NTGTDFSNSSTKTEPSVFTASS | | |
| | | SNSELIRIAPGVVTMRDGRQLD | | |
| | | PDLVEAQRKKLQEMVSSIQASM | | |
| | | DRHLRDQSTEQSPSDLPQRKTE | | |
| | | VVSSSAKSGSLQTGLPESFPLT | | |
| | | GGTENLNTETTDGCVADALGAA | | |
| | | FATRSKAQRGNSVEELEEMDSQ | | |
| | | DAEMTNTTEPMDHS | | |
| UCHL3_HUMAN | 85 | MEGQRWLPLEANPEVTNQFLKQ | 194 | QRWLPLEANPEVTNQFLKQL |
| Ubiquitin | | LGLHPNWQFVDVYGMDPELLSM | | GLHPNWQFVDVYGMDPELLS |
| carboxyl- | | VPRPVCAVLLLFPITEKYEVER | | MVPRPVCAVLLLFPITEKYE |
| terminal | | TEEEEKIKSQGQDVTSSVYFMK | | VFRTEEEEKIKSQGQDVTSS |
| hydrolase | | QTISNACGTIGLIHAIANNKDK | | VYFMKQTISNACGTIGLIHA |
| isozyme L3 | | MHFESGSTLKKFLEESVSMSPE | | IANNKDKMHFESGSTLKKEL |
| | | ERARYLENYDAIRVTHETSAHE | | EESVSMSPEERARYLENYDA |
| | | GQTEAPSIDEKVDLHFIALVHV | | IRVTHETSAHEGQTEAPSID |
| | | DGHLYELDGRKPFPINHGETSD | | EKVDLHFIALVHVDGHLYEL |
| | | ETLLEDAIEVCKKEMERDPDEL | | DGRKPFPINHGETSDETLLE |
| | | RENAIALSAA | | DAIEVCKKEMERDPDELREN |
| | | | | AIALSAA |
| UCHL1_HUMAN | 86 | MQLKPMEINPEMLNKVLSRLGV | 86 | MQLKPMEINPEMLNKVLSRL |
| Ubiquitin | | AGQWRFVDVLGLEEESLGSVPA | | GVAGQWRFVDVLGLEEESLG |
| carboxyl- | | PACALLLLFPLTAQHENFRKKQ | | SVPAPACALLLLFPLTAQHE |
| terminal | | IEELKGQEVSPKVYFMKQTIGN | | NFRKKQIEELKGQEVSPKVY |
| hydrolase | | SCGTIGLIHAVANNQDKLGFED | | FMKQTIGNSCGTIGLIHAVA |
| isozyme L1 | | GSVLKQFLSETEKMSPEDRAKC | | NNQDKLGFEDGSVLKQFLSE |
| | | FEKNEAIQAAHDAVAQEGQCRV | | TEKMSPEDRAKCFEKNEAIQ |
| | | DDKVNFHFILENNVDGHLYELD | | AAHDAVAQEGQCRVDDKVNF |
| | | GRMPFPVNHGASSEDTLLKDAA | | HFILENNVDGHLYELDGRMP |
| | | KVCREFTEREQGEVRESAVALC | | FPVNHGASSEDTLLKDAAKV |
| | | KAA | | CREFTEREQGEVRESAVALC |
| | | | | KAA |
| UCHL5_HUMAN | 87 | MTGNAGEWCLMESDPGVFTELI | 195 | GEWCLMESDPGVFTELIKGF |
| Ubiquitin | | KGFGCRGAQVEEIWSLEPENFE | | GCRGAQVEEIWSLEPENFEK |
| carboxyl- | | KLKPVHGLIFLEKWQPGEEPAG | | LKPVHGLIFLFKWQPGEEPA |
| terminal | | SVVQDSRLDTIFFAKQVINNAC | | GSVVQDSRLDTIFFAKQVIN |
| hydrolase | | ATQAIVSVLLNCTHQDVHLGET | | NACATQAIVSVLLNCTHQDV |
| isozyme L5 | | LSEFKEFSQSFDAAMKGLALSN | | HLGETLSEFKEFSQSEDAAM |
| | | SDVIRQVHNSFARQQMFEEDTK | | KGLALSNSDVIRQVHNSFAR |
| | | TSAKEEDAFHFVSYVPVNGRLY | | QQMFEEDTKTSAKEEDAFHF |
| | | ELDGLREGPIDLGACNQDDWIS | | VSYVPVNGRLYELDGLREGP |
| | | AVRPVIEKRIQKYSEGEIRENL | | IDLGACNQDDWISAVRPVIE |
| | | MAIVSDRKMIYEQKIAELQRQL | | KRIQKYSEGEIRENLMAIVS |
| | | AEEEPMDTDQGNSMLSAIQSEV | | DRK |
| | | AKNQMLIEEEVQKLKRYKIENI | | |
| | | RRKHNYLPFIMELLKTLAEHQQ | | |
| | | LIPLVEKAKEKQNAKKAQETK | | |
| ATX3_HUMAN | 88 | MESIFHEKQEGSLCAQHCLNNL | 196 | ESIFHEKQEGSLCAQHCLNN |
| Ataxin-3 | | LQGEYFSPVELSSIAHQLDEEE | | LLQGEYFSPVELSSIAHQLD |
| | | RMRMAEGGVTSEDYRTFLQQPS | | EEERMRMAEGGVTSEDYRTF |
| | | GNMDDSGFFSIQVISNALKVWG | | LQQPSGNMDDSGFFSIQVIS |
| | | LELILENSPEYQRLRIDPINER | | NALKVWGLELILENSPEYQR |
| | | SFICNYKEHWFTVRKLGKQWEN | | LRIDPINERSFICNYKEHWF |
| | | LNSLLTGPELISDTYLALFLAQ | | TVRKLGKQWFNLNSLLTGPE |
| | | LQQEGYSIFVVKGDLPDCEADQ | | LISDTYLALFLAQLQQEGYS |
| | | LLQMIRVQQMHRPKLIGEELAQ | | IFVVK |
| | | LKEQRVHKTDLERVLEANDGSG | | |
| | | MLDEDEEDLQRALALSRQEIDM | | |
| | | EDEEADLRRAIQLSMQGSSRNI | | |
| | | SQDMTQTSGTNLTSEELRKRRE | | |
| | | AYFEKQQQKQQQQQQQQQQGDL | | |
| | | SGQSSHPCERPATSSGALGSDL | | |
| | | GDAMSEEDMLQAAVTMSLETVR | | |
| | | NDLKTEGKK | | |
| JOS2_HUMAN | 89 | MSQAPGAQPSPPTVYHERQRLE | 197 | PTVYHERQRLELCAVHALNN |
| Josephin-2 | | LCAVHALNNVLQQQLESQEAAD | | VLQQQLFSQEAADEICKRLA |
| | | EICKRLAPDSRLNPHRSLLGTG | | PDSRLNPHRSLLGTGNYDVN |
| | | NYDVNVIMAALQGLGLAAVWWD | | VIMAALQGLGLAAVWWDRRR |
| | | RRRPLSQLALPQVLGLILNLPS | | PLSQLALPQVLGLILNLPSP |
| | | PVSLGLLSLPLRRRHWVALRQV | | VSLGLLSLPLRRRHWVALRQ |
| | | DGVYYNLDSKLRAPEALGDEDG | | VDGVYYNLDSKLRAPEALGD |
| | | VRAFLAAALAQGLCEVLLVVTK | | EDGVRAFLAAALAQGLCEVL |
| | | EVEEKGSWLRTD | | LVV |
| JOS1_HUMAN | 90 | MSCVPWKGDKAKSESLELPQAA | 198 | PQAAPPQIYHEKQRRELCAL |
| Josephin-1 | | PPQIYHEKQRRELCALHALNNV | | HALNNVFQDSNAFTRDTLQE |
| | | FQDSNAFTRDTLQEIFQRLSPN | | IFQRLSPNTMVTPHKKSMLG |
| | | TMVTPHKKSMLGNGNYDVNVIM | | NGNYDVNVIMAALQTKGYEA |
| | | AALQTKGYEAVWWDKRRDVGVI | | VWWDKRRDVGVIALTNVMGF |
| | | ALTNVMGFIMNLPSSLCWGPLK | | IMNLPSSLCWGPLKLPLKRQ |
| | | LPLKRQHWICVREVGGAYYNLD | | HWICVREVGGAYYNLDSKLK |
| | | SKLKMPEWIGGESELRKFLKHH | | MPEWIGGESELRKFLKHHLR |
| | | LRGKNCELLLVVPEEVEAHQSW | | GKNCELLLVV |
| | | RTDV | | |
| ATX3L_HUMAN | 91 | MDFIFHEKQEGFLCAQHCLNNL | 199 | DFIFHEKQEGFLCAQHCLNN |
| Ataxin- | | LQGEYFSPVELASIAHQLDEEE | | LLQGEYFSPVELASIAHQLD |
| 3-like protein | | RMRMAEGGVTSEEYLAFLQQPS | | EEERMRMAEGGVTSEEYLAF |
| | | ENMDDTGFFSIQVISNALKEWG | | LQQPSENMDDTGFFSIQVIS |
| | | LEIIHENNPEYQKLGIDPINER | | NALKFWGLEIIHENNPEYQK |
| | | SFICNYKQHWFTIRKEGKHWEN | | LGIDPINERSFICNYKQHWE |
| | | LNSLLAGPELISDTCLANFLAR | | TIRKFGKHWENLNSLLAGPE |
| | | LQQQAYSVFVVKGDLPDCEADQ | | LISDTCLANFLARLQQQAYS |
| | | LLQIISVEEMDTPKLNGKKLVK | | VFVVK |
| | | QKEHRVYKTVLEKVSEESDESG | | |
| | | TSDQDEEDFQRALELSRQETNR | | |
| | | EDEHLRSTIELSMQGSSGNTSQ | | |
| | | DLPKTSCVTPASEQPKKIKEDY | | |
| | | FEKHQQEQKQQQQQSDLPGHSS | | |
| | | YLHERPTTSSRAIESDLSDDIS | | |
| | | EGTVQAAVDTILEIMRKNLKIK | | |
| | | GEK | | |
| MINY3_HUMAN | 92 | MSELTKELMELVWGTKSSPGLS | 200 | CRWTQGFVFSESEGSALEQF |
| Ubiquitin | | DTIFCRWTQGFVESESEGSALE | | EGGPCAVIAPVQAFLLKKLL |
| carboxyl- | | QFEGGPCAVIAPVQAFLLKKLL | | FSSEKSSWRDCSEEEQKELL |
| terminal | | FSSEKSSWRDCSEEEQKELLCH | | CHTLCDILESACCDHSGSYC |
| hydrolase | | TLCDILESACCDHSGSYCLVSW | | LVSWLRGKTTEETASISGSP |
| MINDY-3 | | LRGKTTEETASISGSPAESSCQ | | AESSCQVEHSSALAVEELGF |
| | | VEHSSALAVEELGFERFHALIQ | | ERFHALIQKRSFRSLPELKD |
| | | KRSFRSLPELKDAVLDQYSMWG | | AVLDQYSMWGNKFG |
| | | NKFGVLLFLYSVLLTKGIENIK | | VLLFLYSVLLTKGIENIKNE |
| | | NEIEDASEPLIDPVYGHGSQSL | | IEDASEPLIDPVYGHGSQSL |
| | | INLLLTGHAVSNVWDGDRECSG | | INLLLTGHAVSNVWDGDREC |
| | | MKLLGIHEQAAVGELTLMEALR | | SGMKLLGIHEQAAVGELTLM |
| | | YCKVGSYLKSPKFPIWIVGSET | | EALRYCKVGSYLKSPKFPIW |
| | | HLTVFFAKDMALVA | | IVGSETHLTVFFAKDMALVA |
| | | PEAPSEQARRVFQTYDPEDNGF | | PEAPSEQARRVFQTYDPEDN |
| | | IPDSLLEDVMKALDLVSDPEYI | | GFIPDSLLEDVMKALDLVSD |
| | | NLMKNKLDPEGLGIILLGPFLQ | | PEYINLMKNKLDPEGIGIIL |
| | | EFFPDQGSSGPESFTVYHYNGL | | LGPFLQEFFPDQGSSGPESF |
| | | KQSNYNEKVMYVEGTAVVMGFE | | TVYHYNGLKQSNYNEKVMYV |
| | | DPMLQTDDTPIKRCLQTKWPYI | | EGTAVVMGFEDPMLQTDDTP |
| | | ELLWTTDRSPSLN | | IKRCLQTKWPYIELLWTTDR |
| | | | | SPSLN |
| MINY1_HUMAN | 93 | MEYHQPEDPAPGKAGTAEAVIP | 201 | YCVKWIPWKGEQTPIITQST |
| Ubiquitin | | ENHEVLAGPDEHPQDTDARDAD | | NGPCPLLAIMNILFLQWKVK |
| carboxyl- | | GEAREREPADQALLPSQCGDNL | | LPPQKEVITSDELMAHLGNC |
| terminal | | ESPLPEASSAPPGPTLGTLPEV | | LLSIKPQEKSEGLQLNFQQN |
| hydrolase | | ETIRACSMPQELPQSPRTRQPE | | VDDAMTVLPKLATGLDVNVR |
| MINDY-1 | | PDFYCVKWIPWKGEQTPIITQS | | FTGVSDFEYTPECSVEDLLG |
| | | TNGPCPLLAIMNILFLQWKVKL | | IPLYHGWLVDPQSPEAVRAV |
| | | PPQKEVITSDELMAHLGNCLLS | | GKLSYNQLVERIITCKHSSD |
| | | IKPQEKSEGLQLNFQQNVDDAM | | TNLVTEGLIAEQFLETTAAQ |
| | | TVLPKLATGLDVNVRFTGVSDF | | LTYHGLCELTAAAKEGELSV |
| | | EYTPECSVEDLLGIPLYHGWLV | | FFRNNHFSTMTKHKSHLYLL |
| | | DPQSPEAVRAVGKLSYNQLVER | | VTDQGFLQEEQVVWESLHNV |
| | | IITCKHSSDTNLVTEGLIAEQF | | DGDSCFCDSDFHLSHSLGKG |
| | | LETTAAQLTYHGLC | | PGAEGGSGSPETQLQVDQDY |
| | | ELTAAAKEGELSVFFRNNHEST | | LIALSLQQQQPRGPLGLTDL |
| | | MTKHKSHLYLLVTDQGELQEEQ | | ELAQQLQQEEYQQQQAAQPV |
| | | VVWESLHNVDGDSCFCDSDEHL | | RMRTRVLSLQGRGATSGRPA |
| | | SHSLGKGPGAEGGSGSPETQLQ | | GERRQRPKHESDCILL |
| | | VDQDYLIALSLQQQQPRGPLGL | | |
| | | TDLELAQQLQQEEYQQQQAAQP | | |
| | | VRMRTRVLSLQGRGATSGRPAG | | |
| | | ERRQRPKHESDCILL | | |
| MINY2_HUMAN | 94 | MESSPESLQPLEHGVAAGPASG | 202 | YHIKWIQWKEENTPIITQNE |
| Ubiquitin | | TGSSQEGLQETRLAAGDGPGVW | | NGPCPLLAILNVLLLAWKVK |
| carboxyl- | | AAETSGGNGLGAAAARRSLPDS | | LPPMMEIITAEQLMEYLGDY |
| terminal | | ASPAGSPEVPGPCSSSAGLDLK | | MLDAKPKEISEIQRLNYEQN |
| hydrolase | | DSGLESPAAAEAPLRGQYKVTA | | MSDAMAILHKLQTGLDVNVR |
| MINDY-2 | | SPETAVAGVGHELGTAGDAGAR | | FTGVRVFEYTPECIVEDLLD |
| | | PDLAGTCQAELTAAGSEEPSSA | | IPLYHGWLVDPQIDDIVKAV |
| | | GGLSSSCSDPSPPGESPSLDSL | | GNCSYNQLVEKIISCKQSDN |
| | | ESFSNLHSFPSSCEENSEEGAE | | SELVSEGFVAEQFLNNTATQ |
| | | NRVPEEEEGAAVLPGAVPLCKE | | LTYHGLCELTSTVQEGELCV |
| | | EEGEETAQVLAASKERFPGQSV | | FFRNNHFSTMTKYKGQLYLL |
| | | YHIKWIQWKEENTPIITQNENG | | VTDQGFLTEEKVVWESLHNV |
| | | PCPLLAILNVLLLAWKVKLPPM | | DGDGNFCDSEFHLRPPSDPE |
| | | MEIITAEQLMEYLG | | TVYKGQQDQIDQDYLMALSL |
| | | DYMLDAKPKEISEIQRLNYEQN | | QQEQQSQEINWEQIPEGISD |
| | | MSDAMAILHKLQTGLDVNVRFT | | LELAKKLQEEEDRRASQYYQ |
| | | GVRVFEYTPECIVEDLLDIPLY | | EQEQAAAAAAAASTQAQQGQ |
| | | HGWLVDPQIDDIVKAVGNCSYN | | PAQASPSSGRQSGNSERKRK |
| | | QLVEKIISCKQSDNSELVSEGF | | EPREKDKEKEKEKNSCVIL |
| | | VAEQFLNNTATQLTYHGLCELT | | |
| | | STVQEGELCVFFRNNHESTMTK | | |
| | | YKGQLYLLVTDQGELTEEKVVW | | |
| | | ESLHNVDGDGNFCDSEFHLRPP | | |
| | | SDPETVYKGQQDQIDQDYLMAL | | |
| | | SLQQEQQSQEINWEQIPEGISD | | |
| | | LELAKKLQEEEDRRASQYYQEQ | | |
| | | EQAAAAAAAASTQAQQGQPAQA | | |
| | | SPSSGRQSGNSERKRKEPREKD | | |
| | | KEKEKEKNSCVIL | | |
| MINY4_HUMAN | 95 | MDSLFVEEVAASLVREFLSRKG | 203 | FCCFNEEWKLQSESESNTAS |
| Probable | | LKKTCVTMDQERPRSDLSINNR | | LKYGIVQNKGGPCGVLAAVQ |
| ubiquitin | | NDLRKVLHLEFLYKENKAKENP | | GCVLQKLLFEGDSKADCAQG |
| carboxyl- | | LKTSLELITRYFLDHEGNTANN | | LQPSDAHRTRCLVLALADIV |
| terminal | | FTQDTPIPALSVPKKNNKVPSR | | WRAGGRERAVVALASRTQQF |
| hydrolase | | CSETTLVNIYDLSDEDAGWRTS | | SPTGKYKADGVLETLTLHSL |
| MINDY-4 | | LSETSKARHDNLDGDVLGNFVS | | TCYEDLVTFLQQSIHQFEVG |
| | | SKRPPHKSKPMQTVPGETPVLT | | PYGCILLTLSAILSRSTELI |
| | | SAWEKIDKLHSEPSLDVKRMGE | | RQDFDVPTSHLIGAHGYCTQ |
| | | NSRPKSGLIVRGMMSGPIASSP | | ELVNLLLTGKAVSNVENDVV |
| | | QDSFHRHYLRRSSPSSSSTQPQ | | ELDSGDGNITLLRGIAARSD |
| | | EESRKVPELFVCTQQDILASSN | | IGFLSLFEHYNMCQVGCFLK |
| | | SSPSRTSLGQLSELTVERQKTT | | TPRFPIWVVCSESHESILES |
| | | ASSPPHLPSKRLPP | | LQPGLLRDWRTERLEDLYYY |
| | | WDRARPRDPSEDTPAVDGSTDT | | DGLANQQEQIRLTIDTTQTI |
| | | DRMPLKLYLPGGNSRMTQERLE | | SEDTDNDLVPPLELCIRTKW |
| | | RAFKRQGSQPAPVRKNQLLPSD | | KGASVNWNGSDPIL |
| | | KVDGELGALRLEDVEDELIREE | | |
| | | VILSPVPSVLKLQTASKPIDLS | | |
| | | VAKEIKTLLFGSSFCCENEEWK | | |
| | | LQSFSFSNTASLKYGIVQNKGG | | |
| | | PCGVLAAVQGCVLQKLLFEGDS | | |
| | | KADCAQGLQPSDAHRTRCLVLA | | |
| | | LADIVWRAGGRERAVVALASRT | | |
| | | QQFSPTGKYKADGVLETLTLHS | | |
| | | LTCYEDLVTFLQQSIHQFEVGP | | |
| | | YGCILLTLSAILSRSTELIRQD | | |
| | | FDVPTSHLIGAHGY | | |
| | | CTQELVNLLLTGKAVSNVENDV | | |
| | | VELDSGDGNITLLRGIAARSDI | | |
| | | GFLSLFEHYNMCQVGCFLKTPR | | |
| | | FPIWVVCSESHESILFSLQPGL | | |
| | | LRDWRTERLEDLYYYDGLANQQ | | |
| | | EQIRLTIDTTQTISEDTDNDLV | | |
| | | PPLELCIRTKWKGASVNWNGSD | | |
| | | PIL | | |
| STABP_HUMAN | 96 | MSDHGDVSLPPEDRVRALSQLG | 204 | VVPGRLCPQFLQLASANTAR |
| STAM- | | SAVEVNEDIPPRRYFRSGVEII | | GVETCGILCGKLMRNEFTIT |
| binding | | RMASIYSEEGNIEHAFILYNKY | | HVLIPKQSAGSDYCNTENEE |
| protein | | ITLFIEKLPKHRDYKSAVIPEK | | ELFLIQDQQGLITLGWIHTH |
| | | KDTVKKLKEIAFPKAEELKAEL | | PTQTAFLSSVDLHTHCSYQM |
| | | LKRYTKEYTEYNEEKKKEAEEL | | MLPESVAIVCSPKFQETGFF |
| | | ARNMAIQQELEKEKQRVAQQKQ | | KLTDHGLEEISSCRQKGFHP |
| | | QQLEQEQFHAFEEMIRNQELEK | | HSKDPPLFCSCSHVTVVDRA |
| | | ERLKIVQEFGKVDPGLGGPLVP | | VTITDLR |
| | | DLEKPSLDVEPTLTVSSIQPSD | | |
| | | CHTTVRPAKPPVVDRSLKPGAL | | |
| | | SNSESIPTIDGLRHVVVPGRLC | | |
| | | PQFLQLASANTARGVETCGILC | | |
| | | GKLMRNEFTITHVL | | |
| | | IPKQSAGSDYCNTENEEELFLI | | |
| | | QDQQGLITLGWIHTHPTQTAFL | | |
| | | SSVDLHTHCSYQMMLPESVAIV | | |
| | | CSPKFQETGFFKLTDHGLEEIS | | |
| | | SCRQKGFHPHSKDPPLFCSCSH | | |
| | | VTVVDRAVTITDLR | | |
| MPND_HUMAN | 97 | MAAPEPLSPAGGAGEEAPEEDE | 205 | VAVSSNVLFLLDFHSHLTRS |
| MPN | | DEAEAEDPERPNAGAGGGRSGG | | EVVGYLGGRWDVNSQMLTVL |
| domain- | | GGSSVSGGGGGGGAGAGGCGGP | | RAFPCRSRLGDAETAAAIEE |
| containing | | GGALTRRAVTLRVLLKDALLEP | | EIYQSLFLRGLSLVGWYHSH |
| protein | | GAGVLSIYYLGKKELGDLQPDG | | PHSPALPSLQDIDAQMDYQL |
| | | RIMWQETGQTENSPSAWATHCK | | RLQGSSNGFQPCLALLCSPY |
| | | KLVNPAKKSGCGWASVKYKGQK | | YSGNPGPESKISPFWVMPPP |
| | | LDKYKATWLRLHQLHTPATAAD | | EMLLVEFYKGSPDLVRLQEP |
| | | ESPASEGEEEELLMEEEEEDVL | | WSQEHTYLDKLKISLASRTP |
| | | AGVSAEDKSRRPLGKSPSEPAH | | KDQSLCHVLEQVCGVLKQGS |
| | | PEATTPGKRVDSKIRVPVRYCM | | |
| | | LGSRDLARNPHTLVEVTSFAAI | | |
| | | NKFQPFNVAVSSNVLELLDEHS | | |
| | | HLTRSEVVGYLGGR | | |
| | | WDVNSQMLTVLRAFPCRSRLGD | | |
| | | AETAAAIEEEIYQSLFLRGLSL | | |
| | | VGWYHSHPHSPALPSLQDIDAQ | | |
| | | MDYQLRLQGSSNGFQPCLALLC | | |
| | | SPYYSGNPGPESKISPFWVMPP | | |
| | | PEMLLVEFYKGSPDLVRLQEPW | | |
| | | SQEHTYLDKLKISLASRTPKDQ | | |
| | | SLCHVLEQVCGVLKQGS | | |
| EMC9_HUMAN | 98 | MGEVEISALAYVKMCLHAARYP | 206 | ALAYVKMCLHAARYPHAAVN |
| ER | | HAAVNGLFLAPAPRSGECLCLT | | GLFLAPAPRSGECLCLTDCV |
| membrane | | DCVPLFHSHLALSVMLEVALNQ | | PLFHSHLALSVMLEVALNQV |
| protein | | VDVWGAQAGLVVAGYYHANAAV | | DVWGAQAGLVVAGYYHANAA |
| complex | | NDQSPGPLALKIAGRIAEFFPD | | VNDQSPGPLALKIAGRIAEF |
| subunit 9 | | AVLIMLDNQKLVPQPRVPPVIV | | FPDAVLIMLDNQKLVPQPRV |
| | | LENQGLRWVPKDKNLVMWRDWE | | PPVIVLENQGLRWVPKDKNL |
| | | ESRQMVGALLEDRAHQHLVDED | | VMWRDWEESRQMVGALLEDR |
| | | CHLDDIRQDWTNQRLNTQITQW | | AHQHLVDEDCHLDDIRQDWT |
| | | VGPTNGNGNA | | NQRLNTQITQWVGPTNGNGN |
| | | | | A |
| PSDE_HUMAN | 99 | MDRLLRLGGGMPGLGQGPPTDA | 207 | QVYISSLALLKMLKHGRAGV |
| 26S | | PAVDTAEQVYISSLALLKMLKH | | PMEVMGLMLGEFVDDYTVRV |
| proteasome | | GRAGVPMEVMGLMLGEFVDDYT | | IDVFAMPQSGTGVSVEAVDP |
| non-ATPase | | VRVIDVFAMPQSGTGVSVEAVD | | VFQAKMLDMLKQTGRPEMVV |
| regulatory | | PVFQAKMLDMLKQTGRPEMVVG | | GWYHSHPGFGCWLSGVDINT |
| subunit 14 | | WYHSHPGFGCWLSGVDINTQQS | | QQSFEALSERAVAVVVDPIQ |
| | | FEALSERAVAVVVDPIQSVKGK | | SVKGKVVIDAFRLINANMMV |
| | | VVIDAFRLINANMMVLGHEPRQ | | LGHEPRQTTSNLGHLNKPSI |
| | | TTSNLGHLNKPSIQALIHGLNR | | QALIHGLNRHYYSITINYRK |
| | | HYYSITINYRKNELEQKMLLNL | | NELEQKMLLNLHKKSWMEGL |
| | | HKKSWMEGLTLQDYSEHCKHNE | | TLQDYSEHCKHNESVVKEML |
| | | SVVKEMLELAKNYNKAVEEEDK | | ELAKNYNKAVEEEDKMTPEQ |
| | | MTPEQLAIKNVGKQDPKRHLEE | | LAIKNVGKQDPKRHLEEHVD |
| | | HVDVLMTSNIVQCLAAMLDTVV | | VLMTSNIVQCLAAMLDTVVE |
| | | FK | | K |
| MYSM1_HUMAN | 100 | MAAEEADVDIEGDVVAAAGAQP | 208 | QVKVASEALLIMDLHAHVSM |
| Histone | | GSGENTASVLQKDHYLDSSWRT | | AEVIGLLGGRYSEVDKVVEV |
| H2A | | ENGLIPWTLDNTISEENRAVIE | | CAAEPCNSLSTGLQCEMDPV |
| deubiquitinase | | KMLLEEEYYLSKKSQPEKVWLD | | SQTQASETLAVRGESVIGWY |
| MYSM1 | | QKEDDKKYMKSLQKTAKIMVHS | | HSHPAFDPNPSLRDIDTQAK |
| | | PTKPASYSVKWTIEEKELFEQG | | YQSYFSRGGAKFIGMIVSPY |
| | | LAKFGRRWTKISKLIGSRTVLQ | | NRNNPLPYSQITCLVISEEI |
| | | VKSYARQYFKNKVKCGLDKETP | | SPDGSYRLPYKFEVQQMLEE |
| | | NQKTGHNLQVKNEDKGTKAWTP | | PQWGLVFEKTRWIIEKYRLS |
| | | SCLRGRADPNLNAVKIEKLSDD | | HSSVPMDKIFRRDSDLTCLQ |
| | | EEVDITDEVDELSSQTPQKNSS | | KLLECMRKTLSKVTNCFMAE |
| | | SDLLLDFPNSKMHETNQGEFIT | | EFLTEIENLFLSNYKSNQEN |
| | | SDSQEALESKSSRGCLQNEKQD | | GVTEENCTKELLM |
| | | ETLSSSEITLWTEK | | |
| | | QSNGDKKSIELNDQKENELIKN | | |
| | | CNKHDGRGIIVDARQLPSPEPC | | |
| | | EIQKNLNDNEMLFHSCQMVEES | | |
| | | HEEEELKPPEQEIEIDRNIIQE | | |
| | | EEKQAIPEFFEGRQAKTPERYL | | |
| | | KIRNYILDQWEICKPKYLNKTS | | |
| | | VRPGLKNCGDVNCIGRIHTYLE | | |
| | | LIGAINFGCEQAVYNRPQTVDK | | |
| | | VRIRDRKDAVEAYQLAQRLQSM | | |
| | | RTRRRRVRDPWGNWCDAKDLEG | | |
| | | QTFEHLSAEELAKRREEEKGRP | | |
| | | VKSLKVPRPTKSSFDPFQLIPC | | |
| | | NFFSEEKQEPFQVKVASEALLI | | |
| | | MDLHAHVSMAEVIG | | |
| | | LLGGRYSEVDKVVEVCAAEPCN | | |
| | | SLSTGLQCEMDPVSQTQASETL | | |
| | | AVRGFSVIGWYHSHPAFDPNPS | | |
| | | LRDIDTQAKYQSYFSRGGAKFI | | |
| | | GMIVSPYNRNNPLPYSQITCLV | | |
| | | ISEEISPDGSYRLPYKFEVQQM | | |
| | | LEEPQWGLVFEKTRWIIEKYRL | | |
| | | SHSSVPMDKIFRRDSDLTCLQK | | |
| | | LLECMRKTLSKVINCEMAEEFL | | |
| | | TEIENLELSNYKSNQENGVTEE | | |
| | | NCTKELLM | | |
| ABRX2_HUMAN | 101 | MAASISGYTFSAVCFHSANSNA | 209 | AVCFHSANSNADHEGELLGE |
| BRISC | | DHEGELLGEVRQEETFSISDSQ | | VRQEETFSISDSQISNTEFL |
| complex | | ISNTEFLQVIEIHNHQPCSKLE | | QVIEIHNHQPCSKLESFYDY |
| subunit | | SFYDYASKVNEESLDRILKDRR | | ASKVNEESLDRILKDRRKKV |
| Abraxas 2 | | KKVIGWYRFRRNTQQQMSYREQ | | IGWYRFRRNTQQQMSYREQV |
| | | VLHKQLTRILGVPDLVELLESF | | LHKQLTRIL |
| | | ISTANNSTHALEYVLERPNRRY | | GVPDLVELLESFISTANNST |
| | | NQRISLAIPNLGNTSQQEYKVS | | HALEYVLERPNRRYNQRISL |
| | | SVPNTSQSYAKVIKEHGTDFFD | | AIPNLGNTSQQEYKVSSVPN |
| | | KDGVMKDIRAIYQVYNALQEKV | | TSQSYAKVIKEHGTDFEDKD |
| | | QAVCADVEKSERVVESCQAEVN | | GVMKDIRAIYQVYNALQEKV |
| | | KLRRQITQRKNEKEQERRLQQA | | QAVCADVEKSERVVESCQAE |
| | | VLSRQMPSESLDPAFSPRMPSS | | VNKLRRQITQRKNEKEQERR |
| | | GFAAEGRSTLGDAE | | LQQAVLSRQMPSESLDPAFS |
| | | ASDPPPPYSDFHPNNQESTLSH | | PRMPSSGFAAEGRSTLGDAE |
| | | SRMERSVEMPRPQAVGSSNYAS | | ASDPPPPYSDFHPNNQESTL |
| | | TSAGLKYPGSGADLPPPQRAAG | | SHSRMERSVEMPRPQAVGSS |
| | | DSGEDSDDSDYENLIDPTEPSN | | NYASTSAGLKYPGSGADLPP |
| | | SEYSHSKDSRPMAHPDEDPRNT | | PQRAAGDSGEDSDDSDYENL |
| | | QTSQI | | IDPTEPSNSEYSHSKDSRPM |
| | | | | AHPDEDPRNTQTSQI |
| PRP8_HUMAN | 102 | MAGVFPYRGPGNPVPGPLAPLP | 210 | FNPRTGQLELKIIHTSVWAG |
| Pre-mRNA- | | DYMSEEKLQEKARKWQQLQAKR | | QKRLGQLAKWKTAEEVAALI |
| processing- | | YAEKRKFGFVDAQKEDMPPEHV | | RSLPVEEQPKQIIVTRKGML |
| splicing factor | | RKIIRDHGDMTNRKFRHDKRVY | | DPLEVHLLDEPNIVIKGSEL |
| 8 | | LGALKYMPHAVLKLLENMPMPW | | QLPFQACLKVEKFGDLILKA |
| | | EQIRDVPVLYHITGAISFVNEI | | TEPQMVLENLYDDWLKTISS |
| | | PWVIEPVYISQWGSMWIMMRRE | | YTAFSRLILILRALHVNNDR |
| | | KRDRRHFKRMRFPPEDDEEPPL | | AKVILKPDKTTITEPHHIWP |
| | | DYADNILDVEPLEAIQLELDPE | | TLTDEEWIKVEVQLKDLILA |
| | | EDAPVLDWFYDHQPLRDSRKYV | | DYGKKNNVNVASLTQSEIRD |
| | | NGSTYQRWQFTLPMMSTLYRLA | | IILGMEISAPSQQRQQIAEI |
| | | NQLLTDLVDDNYFYLFDLKAFF | | EKQTKEQSQLTATQTRTVNK |
| | | TSKALNMAIPGGPKFEPLVRDI | | HGDEIITSTTSNYETQTESS |
| | | NLQDEDWNEENDIN | | KTEWRVRAISAANLHLRTNH |
| | | KIIIRQPIRTEYKIAFPYLYNN | | IYVSSDDIKETGYTYILPKN |
| | | LPHHVHLTWYHTPNVVFIKTED | | VLKKFICISDLRAQIAGYLY |
| | | PDLPAFYFDPLINPISHRHSVK | | GVSPPDNPQVKEIRCIVMVP |
| | | SQEPLPDDDEEFELPEFVEPEL | | QWGTHQTVHLPGQLPQHEYL |
| | | KDTPLYTDNTANGIALLWAPRP | | KEMEPLGWIHTQPNESPQLS |
| | | FNLRSGRTRRALDIPLVKNWYR | | PQDVTTHAKIMADNPSWDGE |
| | | EHCPAGQPVKVRVSYQKLLKYY | | KTIIITCSFTPGSCTLTAYK |
| | | VLNALKHRPPKAQKKRYLFRSF | | LTPSGYEWGRQNTDKGNNPK |
| | | KATKFFQSTKLDWVEVGLQVCR | | GYLPSHYERVOMLLSDRELG |
| | | QGYNMLNLLIHRKNLNYLHLDY | | FFMVPAQSSWNYNEMGVRHD |
| | | NFNLKPVKTLTTKERKKSREGN | | PNMKYELQLANPKEFYHEVH |
| | | AFHLCREVLRLTKLVVDSHVQY | | RPSHELNFALLQEGEVYSAD |
| | | RLGNVDAFQLADGLQYIFAHVG | | REDLYA |
| | | QLTGMYRYKYKLMR | | |
| | | QIRMCKDLKHLIYYRENTGPVG | | |
| | | KGPGCGFWAAGWRVWLFFMRGI | | |
| | | TPLLERWLGNLLARQFEGRHSK | | |
| | | GVAKTVTKQRVESHEDLELRAA | | |
| | | VMHDILDMMPEGIKQNKARTIL | | |
| | | QHLSEAWRCWKANIPWKVPGLP | | |
| | | TPIENMILRYVKAKADWWTNTA | | |
| | | HYNRERIRRGATVDKTVCKKNL | | |
| | | GRLTRLYLKAEQERQHNYLKDG | | |
| | | PYITAEEAVAVYTTTVHWLESR | | |
| | | RESPIPFPPLSYKHDTKLLILA | | |
| | | LERLKEAYSVKSRLNQSQREEL | | |
| | | GLIEQAYDNPHEALSRIKRHLL | | |
| | | TQRAFKEVGIEFMD | | |
| | | LYSHLVPVYDVEPLEKITDAYL | | |
| | | DQYLWYEADKRRLFPPWIKPAD | | |
| | | TEPPPLLVYKWCQGINNLQDVW | | |
| | | ETSEGECNVMLESRFEKMYEKI | | |
| | | DLTLLNRLLRLIVDHNIADYMT | | |
| | | AKNNVVINYKDMNHTNSYGIIR | | |
| | | GLQFASFIVQYYGLVMDLLVLG | | |
| | | LHRASEMAGPPQMPNDFLSFQD | | |
| | | IATEAAHPIRLFCRYIDRIHIF | | |
| | | FRFTADEARDLIQRYLTEHPDP | | |
| | | NNENIVGYNNKKCWPRDARMRL | | |
| | | MKHDVNLGRAVEWDIKNRLPRS | | |
| | | VTTVQWENSFVSVYSKDNPNLL | | |
| | | FNMCGFECRILPKC | | |
| | | RTSYEEFTHKDGVWNLQNEVTK | | |
| | | ERTAQCFLRVDDESMQRFHNRV | | |
| | | RQILMASGSTTFTKIVNKWNTA | | |
| | | LIGLMTYFREAVVNTQELLDLL | | |
| | | VKCENKIQTRIKIGLNSKMPSR | | |
| | | FPPVVFYTPKELGGLGMLSMGH | | |
| | | VLIPQSDLRWSKQTDVGITHER | | |
| | | SGMSHEEDQLIPNLYRYIQPWE | | |
| | | SEFIDSQRVWAEYALKRQEAIA | | |
| | | QNRRLTLEDLEDSWDRGIPRIN | | |
| | | TLFQKDRHTLAYDKGWRVRTDE | | |
| | | KQYQVLKQNPFWWTHQRHDGKL | | |
| | | WNLNNYRTDMIQALGGVEGILE | | |
| | | HTLFKGTYFPTWEG | | |
| | | LFWEKASGFEESMKWKKLTNAQ | | |
| | | RSGLNQIPNRRFTLWWSPTINR | | |
| | | ANVYVGFQVQLDLTGIFMHGKI | | |
| | | PTLKISLIQIFRAHLWQKIHES | | |
| | | IVMDLCQVEDQELDALEIETVQ | | |
| | | KETIHPRKSYKMNSSCADILLE | | |
| | | ASYKWNVSRPSLLADSKDVMDS | | |
| | | TTTQKYWIDIQLRWGDYDSHDI | | |
| | | ERYARAKFLDYTTDNMSIYPSP | | |
| | | TGVLIAIDLAYNLHSAYGNWFP | | |
| | | GSKPLIQQAMAKIMKANPALYV | | |
| | | LRERIRKGLQLYSSEPTEPYLS | | |
| | | SQNYGELFSNQIIWFVDDTNVY | | |
| | | RVTIHKTFEGNLTT | | |
| | | KPINGAIFIENPRTGQLELKII | | |
| | | HTSVWAGQKRLGQLAKWKTAEE | | |
| | | VAALIRSLPVEEQPKQIIVTRK | | |
| | | GMLDPLEVHLLDEPNIVIKGSE | | |
| | | LQLPFQACLKVEKFGDLILKAT | | |
| | | EPQMVLFNLYDDWLKTISSYTA | | |
| | | FSRLILILRALHVNNDRAKVIL | | |
| | | KPDKTTITEPHHIWPTLTDEEW | | |
| | | IKVEVQLKDLILADYGKKNNVN | | |
| | | VASLTQSEIRDIILGMEISAPS | | |
| | | QQRQQIAEIEKQTKEQSQLTAT | | |
| | | QTRTVNKHGDEIITSTTSNYET | | |
| | | QTFSSKTEWRVRAISAANLHLR | | |
| | | TNHIYVSSDDIKET | | |
| | | GYTYILPKNVLKKFICISDLRA | | |
| | | QIAGYLYGVSPPDNPQVKEIRC | | |
| | | IVMVPQWGTHQTVHLPGQLPQH | | |
| | | EYLKEMEPLGWIHTQPNESPQL | | |
| | | SPQDVTTHAKIMADNPSWDGEK | | |
| | | TIIITCSFTPGSCTLTAYKLTP | | |
| | | SGYEWGRQNTDKGNNPKGYLPS | | |
| | | HYERVQMLLSDRELGFFMVPAQ | | |
| | | SSWNYNEMGVRHDPNMKYELQL | | |
| | | ANPKEFYHEVHRPSHELNFALL | | |
| | | QEGEVYSADREDLYA | | |
| NPL4_HUMAN | 103 | MAESIIIRVQSPDGVKRITATK | 211 | QPSAITLNRQKYRHVDNIME |
| Nuclear | | RETAATFLKKVAKEFGFQNNGE | | ENHTVADRFLDFWRKTGNQH |
| protein | | SVYINRNKTGEITASSNKSLNL | | FGYLYGRYTEHKDIPLGIRA |
| localization | | LKIKHGDLLFLFPSSLAGPSSE | | EVAAIYEPPQIGTQNSLELL |
| protein 4 | | METSVPPGFKVEGAPNVVEDEI | | EDPKAEVVDEIAAKLGLRKV |
| homolog | | DQYLSKQDGKIYRSRDPQLCRH | | GWIFTDLVSEDTRKGTVRYS |
| | | GPLGKCVHCVPLEPFDEDYLNH | | RNKDTYFLSSEECITAGDFQ |
| | | LEPPVKHMSFHAYIRKLTGGAD | | NKHPNMCRLSPDGHFGSKFV |
| | | KGKFVALENISCKIKSGCEGHL | | TAVATGGPDNQVHFEGYQVS |
| | | PWPNGICTKCQPSAITLNRQKY | | NQCMALVRDECLLPCKDAPE |
| | | RHVDNIMFENHTVADRELDEWR | | LGYAKESSSEQYVPDVFYKD |
| | | KTGNQHFGYLYGRYTEHKDIPL | | VDKFGNEITQLARPLPVEYL |
| | | GIRAEVAAIYEPPQIGTQNSLE | | IIDITTTFPKDPVYTESISQ |
| | | LLEDPKAEVVDEIA | | NPFPIENRDVLGETQDFHSL |
| | | AKLGLRKVGWIFTDLVSEDTRK | | ATYLSQNTSSVELDTISDFH |
| | | GTVRYSRNKDTYFLSSEECITA | | LLLFLVTNEVMPLQDSISLL |
| | | GDFQNKHPNMCRLSPDGHFGSK | | LEAVRTRNEELAQTWKRSEQ |
| | | FVTAVATGGPDNQVHFEGYQVS | | WATIEQLCSTVGGQLPGLHE |
| | | NQCMALVRDECLLPCKDAPELG | | YGAVGGSTHTATAAMWACQH |
| | | YAKESSSEQYVPDVFYKDVDKF | | CTFMNQPGTGHCEMCSLPRT |
| | | GNEITQLARPLPVEYLIIDITT | | |
| | | TFPKDPVYTESISQNPFPIENR | | |
| | | DVLGETQDFHSLATYLSQNTSS | | |
| | | VELDTISDFHLLLFLVTNEVMP | | |
| | | LQDSISLLLEAVRTRNEELAQT | | |
| | | WKRSEQWATIEQLCSTVGGQLP | | |
| | | GLHEYGAVGGSTHTATAAMWAC | | |
| | | QHCTFMNQPGTGHCEMCSLPRT | | |
| EMC8_HUMAN | 104 | MPGVKLTTQAYCKMVLHGAKYP | 212 | TQAYCKMVLHGAKYPHCAVN |
| ER | | HCAVNGLLVAEKQKPRKEHLPL | | GLLVAEKQKPRKEHLPLGGP |
| membrane | | GGPGAHHTLFVDCIPLFHGTLA | | GAHHTLFVDCIPLFHGTLAL |
| protein | | LAPMLEVALTLIDSWCKDHSYV | | APMLEVALTLIDSWCKDHSY |
| complex | | IAGYYQANERVKDASPNQVAEK | | VIAGYYQANERVKDASPNQV |
| subunit 8 | | VASRIAEGFSDTALIMVDNTKF | | AEKVASRIAEGFSDTALIMV |
| | | TMDCVAPTIHVYEHHENRWRCR | | DNTKFTMDCVAPTIHVYEHH |
| | | DPHHDYCEDWPEAQRISASLLD | | ENRWRCRDPHHDYCEDWPEA |
| | | SRSYETLVDEDNHLDDIRNDWT | | QRISASLLDSRSYETLVDED |
| | | NPEINKAVLHLC | | NHLDDIRNDWTNPEINKAVL |
| | | | | HLC |
| ABRX1_HUMAN | 105 | MEGESTSAVLSGFVLGALAFQH | 213 | GFVLGALAFQHLNTDSDTEG |
| BRCA1-A | | LNTDSDTEGELLGEVKGEAKNS | | FLLGEVKGEAKNSITDSQMD |
| complex | | ITDSQMDDVEVVYTIDIQKYIP | | DVEVVYTIDIQKYIPCYQLF |
| subunit | | CYQLFSFYNSSGEVNEQALKKI | | SFYNSSGEVNEQALKKILSN |
| Abraxas 1 | | LSNVKKNVVGWYKFRRHSDQIM | | VKKNVVGWYKFRRHSDQIMT |
| | | TFRERLLHKNLQEHFSNQDLVE | | FRERLLHKNLQEHFSNQDLV |
| | | LLLTPSIITESCSTHRLEHSLY | | FLLLTPSIITESCSTHRLEH |
| | | KPQKGLFHRVPLVVANLGMSEQ | | SLYKPQKGLFHRVPLVVANL |
| | | LGYKTVSGSCMSTGFSRAVQTH | | GMSEQLGYKTVSGSCMSTGF |
| | | SSKFFEEDGSLKEVHKINEMYA | | SRAVQTHSSKFFEEDGSLKE |
| | | SLQEELKSICKKVEDSEQAVDK | | VHKINEMYASLQEELKSICK |
| | | LVKDVNRLKREIEKRRGAQIQA | | KVEDSEQAVDKLVKDVNRLK |
| | | AREKNIQKDPQENIFLCQALRT | | REIEKRRGAQIQAAREKNIQ |
| | | FFPNSEFLHSCVMS | | KDPQENIFLCQALRTFFPNS |
| | | LKNRHVSKSSCNYNHHLDVVDN | | EFLHSCVMSLKNRHVSKSSC |
| | | LTLMVEHTDIPEASPASTPQII | | NYNHHLDVVDNLTLMVEHTD |
| | | KHKALDLDDRWQFKRSRLLDTQ | | IPEASPASTPQIIKHKALDL |
| | | DKRSKADTGSSNQDKASKMSSP | | DDRWQFKRSRLLDTQDKRSK |
| | | ETDEEIEKMKGFGEYSRSPTF | | ADTGSSNQDKASKMSSPETD |
| | | | | EEIEKMKGFGEYSRSPTF |
| STALP_HUMAN | 106 | MDQPFTVNSLKKLAAMPDHTDV | 214 | VVLPEDLCHKELQLAESNTV |
| AMSH- | | SLSPEERVRALSKLGCNITISE | | RGIETCGILCGKLTHNEFTI |
| like protease | | DITPRRYFRSGVEMERMASVYL | | THVIVPKQSAGPDYCDMENV |
| | | EEGNLENAFVLYNKFITLFVEK | | EELFNVQDQHDLLTLGWIHT |
| | | LPNHRDYQQCAVPEKQDIMKKL | | HPTQTAFLSSVDLHTHCSYQ |
| | | KEIAFPRTDELKNDLLKKYNVE | | LMLPEAIAIVCSPKHKDTGI |
| | | YQEYLQSKNKYKAEILKKLEHQ | | FRLTNAGMLEVSACKKKGFH |
| | | RLIEAERKRIAQMRQQQLESEQ | | PHTKEPRLFSICKHVLVKDI |
| | | FLFFEDQLKKQELARGQMRSQQ | | KIIVLDLR |
| | | TSGLSEQIDGSALSCFSTHQNN | | |
| | | SLLNVFADQPNKSDATNYASHS | | |
| | | PPVNRALTPAATLSAVQNLVVE | | |
| | | GLRCVVLPEDLCHKELQLAESN | | |
| | | TVRGIETCGILCGK | | |
| | | LTHNEFTITHVIVPKQSAGPDY | | |
| | | CDMENVEELFNVQDQHDLLTLG | | |
| | | WIHTHPTQTAFLSSVDLHTHCS | | |
| | | YQLMLPEAIAIVCSPKHKDTGI | | |
| | | FRLTNAGMLEVSACKKKGFHPH | | |
| | | TKEPRLFSICKHVLVKDIKIIV | | |
| | | LDLR | | |
| CSN6_HUMAN | 107 | MAAAAAAAAATNGTGGSSGMEV | 215 | VALHPLVILNISDHWIRMRS |
| COP9 | | DAAVVPSVMACGVTGSVSVALH | | QEGRPVQVIGALIGKQEGRN |
| signalosome | | PLVILNISDHWIRMRSQEGRPV | | IEVMNSFELLSHTVEEKIII |
| complex | | QVIGALIGKQEGRNIEVMNSFE | | DKEYYYTKEEQFKQVFKELE |
| subunit 6 | | LLSHTVEEKIIIDKEYYYTKEE | | FLGWYTTGGPPDPSDIHVHK |
| | | QFKQVFKELEFLGWYTTGGPPD | | QVCEIIESPLFLKLNPMTKH |
| | | PSDIHVHKQVCEIIESPLELKL | | TDLPVSVFESVIDIINGEAT |
| | | NPMTKHTDLPVSVFESVIDIIN | | MLFAELTYTLATEEAERIGV |
| | | GEATMLFAELTYTLATEEAERI | | DHVARMTATGSGENSTVAEH |
| | | GVDHVARMTATGSGENSTVAEH | | LIAQHSAIKMLHSRVKLILE |
| | | LIAQHSAIKMLHSRVKLILEYV | | YVKASEAGEVPFNHEILREA |
| | | KASEAGEVPFNHEILREAYALC | | YALCHCLPVLSTDKFKTDFY |
| | | HCLPVLSTDKFKTDFYDQCNDV | | DQCNDVGLMAYLGTITKTCN |
| | | GLMAYLGTITKTCNTMNQFVNK | | TMNQFVNKFNVLYDRQGIGR |
| | | FNVLYDRQGIGRRMRGLFF | | RMRGLFF |
| EIF3F_HUMAN | 108 | MATPAVPVSAPPATPTPVPAAA | 216 | VRLHPVILASIVDSYERRNE |
| Eukaryotic | | PASVPAPTPAPAAAPVPAAAPA | | GAARVIGTLLGTVDKHSVEV |
| translation | | SSSDPAAAAAATAAPGQTPASA | | TNCFSVPHNESEDEVAVDME |
| initiation | | QAPAQTPAPALPGPALPGPFPG | | FAKNMYELHKKVSPNELILG |
| factor 3 | | GRVVRLHPVILASIVDSYERRN | | WYATGHDITEHSVLIHEYYS |
| subunit F | | EGAARVIGTLLGTVDKHSVEVT | | REAPNPIHLTVDTSLQNGRM |
| | | NCFSVPHNESEDEVAVDMEFAK | | SIKAYVSTLMGVPGRTMGVM |
| | | NMYELHKKVSPNELILGWYATG | | FTPLTVKYAYYDTERIGVDL |
| | | HDITEHSVLIHEYYSREAPNPI | | IMKTCFSPNRVIGLSSDLQQ |
| | | HLTVDTSLQNGRMSIKAYVSTL | | VGGASARIQDALSTVLQYAE |
| | | MGVPGRTMGVMFTPLTVKYAYY | | DVLSGKVSADNTVGRFLMSL |
| | | DTERIGVDLIMKTCFSPNRVIG | | VNQVPKIVPDDFETMLNSNI |
| | | LSSDLQQVGGASARIQDALSTV | | NDLLMVTYLANLTQSQIALN |
| | | LQYAEDVLSGKVSADNTVGREL | | EKLVNL |
| | | MSLVNQVPKIVPDDFETMLNSN | | |
| | | INDLLMVTYLANLTQSQIALNE | | |
| | | KLVNL | | |
| PSMD7_HUMAN | 109 | MPELAVQKVVVHPLVLLSVVDH | 217 | VVVHPLVLLSVVDHENRIGK |
| 26S | | FNRIGKVGNQKRVVGVLLGSWQ | | VGNQKRVVGVLLGSWQKKVL |
| proteasome | | KKVLDVSNSFAVPFDEDDKDDS | | DVSNSFAVPFDEDDKDDSVW |
| non-ATPase | | VWFLDHDYLENMYGMFKKVNAR | | FLDHDYLENMYGMFKKVNAR |
| regulatory | | ERIVGWYHTGPKLHKNDIAINE | | ERIVGWYHTGPKLHKNDIAI |
| subunit 7 | | LMKRYCPNSVLVIIDVKPKDLG | | NELMKRYCPNSVLVIIDVKP |
| | | LPTEAYISVEEVHDDGTPTSKT | | KDLGLPTEAYISVEEVHDDG |
| | | FEHVTSEIGAEEAEEVGVEHLL | | TPTSKTFEHVTSEIGAEEAE |
| | | RDIKDTTVGTLSQRITNQVHGL | | EVGVEHLLRDIKDTTVGTLS |
| | | KGLNSKLLDIRSYLEKVATGKL | | QRITNQVHGLKGLNSKLLDI |
| | | PINHQIIYQLQDVENLLPDVSL | | RSYLEKVATGKLPINHQIIY |
| | | QEFVKAFYLKTNDQMVVVYLAS | | QLQDVFNLLPDVSLQEFVKA |
| | | LIRSVVALHNLINNKIANRDAE | | FYLKTNDQMVVVYLASLIRS |
| | | KKEGQEKEESKKDRKEDKEKDK | | VVALHNLINNKIANRDAEKK |
| | | DKEKSDVKKEEKKEKK | | EGQEKEESKKDRKEDKEKDK |
| | | | | DKEKSDVKKEEKKEKK |
| EIF3H_HUMAN | 110 | MASRKEGTGSTATSSSSTAGAA | 218 | VQIDGLVVLKIIKHYQEEGQ |
| Eukaryotic | | GKGKGKGGSGDSAVKQVQIDGL | | GTEVVQGVLLGLVVEDRLEI |
| translation | | VVLKIIKHYQEEGQGTEVVQGV | | TNCFPFPQHTEDDADEDEVQ |
| initiation | | LLGLVVEDRLEITNCFPFPQHT | | YQMEMMRSLRHVNIDHLHVG |
| factor 3 | | EDDADEDEVQYQMEMMRSLRHV | | WYQSTYYGSFVTRALLDSQF |
| subunit H | | NIDHLHVGWYQSTYYGSFVTRA | | SYQHAIEESVVLIYDPIKTA |
| | | LLDSQFSYQHAIEESVVLIYDP | | QGSLSLKAYRLTPKLMEVCK |
| | | IKTAQGSLSLKAYRLTPKLMEV | | EKDESPEALKKANITFEYME |
| | | CKEKDFSPEALKKANITFEYME | | EEVPIVIKNSHLINVLMWEL |
| | | EEVPIVIKNSHLINVLMWELEK | | EKKSAVADKHELLSLASSNH |
| | | KSAVADKHELLSLASSNHLG | | LGKNLQLLMDRVDEMSQDIV |
| | | KNLQLLMDRVDEMSQDIVKYNT | | KYNTYMRNTSKQQQQKHQYQ |
| | | YMRNTSKQQQQKHQYQQRRQQE | | QRRQQENMQRQSRGEPPLPE |
| | | NMQRQSRGEPPLPEEDLSKLFK | | EDLSKLFKPPQPPARMDSLL |
| | | PPQPPARMDSLLIAGQINTYCQ | | IAGQINTYCQNIKEFTAQNL |
| | | NIKEFTAQNLGKLEMAQALQEY | | GKLFMAQALQEYNN |
| | | NN | | |
| CSN5_HUMAN | 111 | MAASGSGMAQKTWELANNMQEA | 219 | YCKISALALLKMVMHARSGG |
| COP9 | | QSIDEIYKYDKKQQQEILAAKP | | NLEVMGLMLGKVDGETMIIM |
| signalosome | | WTKDHHYFKYCKISALALLKMV | | DSFALPVEGTETRVNAQAAA |
| complex | | MHARSGGNLEVMGLMLGKVDGE | | YEYMAAYIENAKQVGRLENA |
| subunit 5 | | TMIIMDSFALPVEGTETRVNAQ | | IGWYHSHPGYGCWLSGIDVS |
| | | AAAYEYMAAYIENAKQVGRLEN | | TQMLNQQFQEPFVAVVIDPT |
| | | AIGWYHSHPGYGCWLSGIDVST | | RTISAGKVNLGAFRTYPKGY |
| | | QMLNQQFQEPFVAVVIDPTRTI | | KPPDEGPSEYQTIPLNKIED |
| | | SAGKVNLGAFRTYPKGYKPPDE | | FGVHCKQYYALEVSYFKSSL |
| | | GPSEYQTIPLNKIEDFGVHCKQ | | DRKLLELLWNKYWVNTLSSS |
| | | YYALEVSYFKSSLDRKLLELLW | | SLLTNADYTTGQVEDLSEKL |
| | | NKYWVNTLSSSSLLTNADYTTG | | EQSEAQLGRGSFMLGLETHD |
| | | QVEDLSEKLEQSEAQLGRGSEM | | RKSEDKLAKATRDSCKTTIE |
| | | LGLETHDRKSEDKLAKATRDSC | | AIHGLMSQVIKDKLENQINI |
| | | KTTIEAIHGLMSQVIKDKLENQ | | S |
| | | INIS | | |
| BRCC3_HUMAN | 112 | MAVQVVQAVQAVHLESDAFLVC | 220 | VHLESDAFLVCLNHALSTEK |
| Lys-63- | | LNHALSTEKEEVMGLCIGELND | | EEVMGLCIGELNDDTRSDSK |
| specific | | DTRSDSKFAYTGTEMRTVAEKV | | FAYTGTEMRTVAEKVDAVRI |
| deubiquitinase | | DAVRIVHIHSVIILRRSDKRKD | | VHIHSVIILRRSDKRKDRVE |
| BRCC36 | | RVEISPEQLSAASTEAERLAEL | | ISPEQLSAASTEAERLAELT |
| | | TGRPMRVVGWYHSHPHITVWPS | | GRPMRVVGWYHSHPHITVWP |
| | | HVDVRTQAMYQMMDQGEVGLIF | | SHVDVRTQAMYQMMDQGFVG |
| | | SCFIEDKNTKTGRVLYTCFQSI | | LIFSCFIEDKNTKTGRVLYT |
| | | QAQKSSESLHGPRDEWSSSQHI | | CFQSIQAQKSSESLHGPRDE |
| | | SIEGQKEEERYERIEIPIHIVP | | WSSSQHISIEGQKEEERYER |
| | | HVTIGKVCLESAVELPKILCQE | | IEIPIHIVPHVTIGKVCLES |
| | | EQDAYRRIHSLTHLDSVIKIHN | | AVELPKILCQEEQDAYRRIH |
| | | GSVFTKNLCSQMSAVSGPLLQW | | SLTHLDSVTKIHNGSVETKN |
| | | LEDRLEQNQQHLQELQQEKEEL | | LCSQMSAVSGPLLQWLEDRL |
| | | MQELSSLE | | EQNQQHLQELQQEKEELMQE |
| | | | | LSSLE |

### 5.3.2 Targeting Domain

[0193] In some embodiments, the targeting domain comprises a targeting moiety that specifically binds to a target cytosolic protein. In some embodiments, the targeting moiety comprises an antibody (or antigen binding fragment thereof). In some embodiments, the antibody is a full-length antibody, a single chain variable fragment (scFv), a (scFv)₂, a scFv-Fc, a Fab, a Fab′, a (Fab′)₂, a F(v), a single domain antibody, a single chain antibody, a VHH, or a (VHH)₂. In some embodiments the targeting moiety comprises a VHH. In some embodiments the targeting moiety comprises a (VHH)₂.

[0194] In some embodiments, the targeting moiety specifically binds to a wild type target cytosolic protein. In some embodiments, the targeting moiety specifically binds to a wild type target cytosolic protein, but does not specifically binds to a variant of the target cytosolic protein associated with a genetic disease. In some embodiments, the targeting moiety specifically binds to a naturally occurring variant of a target cytosolic protein. In some embodiments, the targeting moiety specifically binds to a naturally occurring variant of a target cytosolic protein that is associated with a genetic disease (e.g., a genetic disease described herein). In some embodiments, the targeting moiety specifically binds to a naturally occurring variant of a target cytosolic protein that is a cause of a genetic disease (e.g., a genetic disease described herein). In some embodiments, the targeting moiety specifically binds a naturally occurring variant of a target cytosolic protein that is a loss of a function variant. In some embodiments, the targeting moiety specifically binds a naturally occurring variant of a target cytosolic protein that is a loss of a function variant associated with a genetic disease (e.g., a genetic disease described herein). In some embodiments, the targeting moiety specifically binds a naturally occurring variant of a target cytosolic protein that is a loss of a function variant that causes a genetic disease (e.g., a genetic disease described herein).

### 5.3.2.1 Exemplary Target Cytosolic Proteins

[0195] In some embodiments, targeting moiety specifically binds a target cytosolic protein (e.g., a cytosolic protein described herein). Exemplary target cytosolic proteins include, but are not limited to, Ras/Rap GTPase-activating protein (SYNGAP1), cyclin-dependent kinase-like 5 (CDKL5), copper-transporting ATPase 2 (ATP7B), syntaxin-binding protein 1 (STXBP1), progranulin (GRN), protein jagged-1 (JAG1), GATOR complex protein DEPDC5 (DEPDC5), tuberin (TSC2), hamartin (TSC1), kinesin-like protein KIF1A (KIF1A), dynamin-1 (DNM1), SH3 and multiple ankyrin repeat domains protein 3 (SHANK3), dystrophin (DMD), oxygen-regulated protein 1 (RP1), titin (TTN), cytoplasmic dynein 1 heavy chain 1 (DYNCIHI), TRIO and F-actin-binding protein (TRIO), probable ubiquitin carboxyl-terminal hydrolase FAF-X (USP9X), Cystatin-B (CSTB), and Pterin-4-alpha-carbinolamine dehydratase (PCBD1).

[0196] In some embodiments, the target cytosolic protein is SYNGAP1. In some embodiments, the target cytosolic protein is CDKL5. In some embodiments, the target cytosolic protein is ATP7B. In some embodiments, the target cytosolic protein is STXBP1. In some embodiments, the target cytosolic protein is GRN. In some embodiments, the target cytosolic protein is JAG1. In some embodiments, the target cytosolic protein is DEPDC5. In some embodiments, the target cytosolic protein is TSC2. In some embodiments, the target cytosolic protein is TSC1. In some embodiments, the target cytosolic protein is KIF1A. In some embodiments, the target cytosolic protein is DNM1. In some embodiments, the target cytosolic protein is SHANK3. In some embodiments, the target cytosolic protein is DMD. In some embodiments, the target cytosolic protein is TNT. In some embodiments, the target cytosolic protein is DYNCIHI. In some embodiments, the target cytosolic protein is TRIO. In some embodiments, the target cytosolic protein is USP9X. In some embodiments, the target cytosolic protein is TRIO. In some embodiments, the target cytosolic protein is USP9X. In some embodiments, the target cytosolic protein is CSTB. In some embodiments, the target cytosolic protein is USP9X. In some embodiments, the target cytosolic protein is PCBD1.

[0197] In some embodiments, the target cytosolic protein comprises an amino acid sequence at least 90%, 91%, 92%, 93%, 94%, 95%, 96%, 97%, 98%, 99%, or 100% identical to the amino acid sequence of SEQ ID NO: 221. In some embodiments, the target cytosolic protein comprises an amino acid sequence at least 90%, 91%, 92%, 93%, 94%, 95%, 96%, 97%, 98%, 99%, or 100% identical to the amino acid sequence of SEQ ID NO: 222. In some embodiments, the target cytosolic protein comprises an amino acid sequence at least 90%, 91%, 92%, 93%, 94%, 95%, 96%, 97%, 98%, 99%, or 100% identical to the amino acid sequence of SEQ ID NO: 223. In some embodiments, the target cytosolic protein comprises an amino acid sequence at least 90%, 91%, 92%, 93%, 94%, 95%, 96%, 97%, 98%, 99%, or 100% identical to the amino acid sequence of SEQ ID NO: 224. In some embodiments, the target cytosolic protein comprises an amino acid sequence at least 90%, 91%, 92%, 93%, 94%, 95%, 96%, 97%, 98%, 99%, or 100% identical to the amino acid sequence of SEQ ID NO: 225. In some embodiments, the target cytosolic protein comprises an amino acid sequence at least 90%, 91%, 92%, 93%, 94%, 95%, 96%, 97%, 98%, 99%, or 100% identical to the amino acid sequence of SEQ ID NO: 226. In some embodiments, the target cytosolic protein comprises an amino acid sequence at least 90%, 91%, 92%, 93%, 94%, 95%, 96%, 97%, 98%, 99%, or 100% identical to the amino acid sequence of SEQ ID NO: 227. In some embodiments, the target cytosolic protein comprises an amino acid sequence at least 90%, 91%, 92%, 93%, 94%, 95%, 96%, 97%, 98%, 99%, or 100% identical to the amino acid sequence of SEQ ID NO: 228. In some embodiments, the target cytosolic protein comprises an amino acid sequence at least 90%, 91%, 92%, 93%, 94%, 95%, 96%, 97%, 98%, 99%, or 100% identical to the amino acid sequence of SEQ ID NO: 229. In some embodiments, the target cytosolic protein comprises an amino acid sequence at least 90%, 91%, 92%, 93%, 94%, 95%, 96%, 97%, 98%, 99%, or 100% identical to the amino acid sequence of SEQ ID NO: 230. In some embodiments, the target cytosolic protein comprises an amino acid sequence at least 90%, 91%, 92%, 93%, 94%, 95%, 96%, 97%, 98%, 99%, or 100% identical to the amino acid sequence of SEQ ID NO: 231. In some embodiments, the target cytosolic protein comprises an amino acid sequence at least 90%, 91%, 92%, 93%, 94%, 95%, 96%, 97%, 98%, 99%, or 100% identical to the amino acid sequence of SEQ ID NO: 232. In some embodiments, the target cytosolic protein comprises an amino acid sequence at least 90%, 91%, 92%, 93%, 94%, 95%, 96%, 97%, 98%, 99%, or 100% identical to the amino acid sequence of SEQ ID NO: 233. In some embodiments, the target cytosolic protein comprises an amino acid sequence at least 90%, 91%, 92%, 93%, 94%, 95%, 96%, 97%, 98%, 99%, or 100% identical to the amino acid sequence of SEQ ID NO: 234. In some embodiments, the target cytosolic protein comprises an amino acid sequence at least 90%, 91%, 92%, 93%, 94%, 95%, 96%, 97%, 98%, 99%, or 100% identical to the amino acid sequence of SEQ ID NO: 235. In some embodiments, the target cytosolic protein comprises an amino acid sequence at least 90%, 91%, 92%, 93%, 94%, 95%, 96%, 97%, 98%, 99%, or 100% identical to the amino acid sequence of SEQ ID NO: 236. In some embodiments, the target cytosolic protein comprises an amino acid sequence at least 90%, 91%, 92%, 93%, 94%, 95%, 96%, 97%, 98%, 99%, or 100% identical to the amino acid sequence of SEQ ID NO: 237. In some embodiments, the target cytosolic protein comprises an amino acid sequence at least 90%, 91%, 92%, 93%, 94%, 95%, 96%, 97%, 98%, 99%, or 100% identical to the amino acid sequence of SEQ ID NO: 238. In some embodiments, the target cytosolic protein comprises an amino acid sequence at least 90%, 91%, 92%, 93%, 94%, 95%, 96%, 97%, 98%, 99%, or 100% identical to the amino acid sequence of SEQ ID NO: 287. In some embodiments, the target cytosolic protein comprises an amino acid sequence at least 90%, 91%, 92%, 93%, 94%, 95%, 96%, 97%, 98%, 99%, or 100% identical to the amino acid sequence of SEQ ID NO: 288. In some embodiments, the target cytosolic protein comprises an amino acid sequence at least 90%, 91%, 92%, 93%, 94%, 95%, 96%, 97%, 98%, 99%, or 100% identical to the amino acid sequence of SEQ ID NO: 289.

[0198] Table 2 below, provides the wild type amino acid sequence of exemplary proteins to target for deubiquitination utilizing the fusion proteins described herein.

TABLE 2
The amino acid sequence of exemplary cytosolic proteins to target for deubiquitination
utilizing the fusion proteins described herein and exemplary disease associations

| | Disease | SEQ | |
|---|---|---|---|
| Description | Associations | ID NO | Wild Type Amino Acid Sequence |
| Cyclin- | CDKL5 | 221 | MKIPNIGNVMNKFEILGVVGEGAYGVVLKCRHKETHE |
| dependent | Deficiency | | IVAIKKFKDSEENEEVKETTLRELKMLRTLKQENIVE |
| kinase-like 5 | Disorder; | | LKEAFRRRGKLYLVFEYVEKNMLELLEEMPNGVPPEK |
| (CDKL5) | Epileptic | | VKSYIYQLIKAIHWCHKNDIVHRDIKPENLLISHNDV |
| | encephalopathy, | | LKLCDFGFARNLSEGNNANYTEYVATRWYRSPELLLG |
| | early infantile | | APYGKSVDMWSVGCILGELSDGQPLFPGESEIDQLFT |
| | Type 2 | | IQKVLGPLPSEQMKLFYSNPRFHGLRFPAVNHPQSLE |
| | | | RRYLGILNSVLLDLMKNLLKLDPADRYLTEQCLNHPT |
| | | | FQTQRLLDRSPSRSAKRKPYHVESSTLSNRNQAGKST |
| | | | ALQSHHRSNSKDIQNLSVGLPRADEGLPANESELNGN |
| | | | LAGASLSPLHTKTYQASSQPGSTSKDLINNNIPHLLS |
| | | | PKEAKSKTEFDFNIDPKPSEGPGTKYLKSNSRSQQNR |
| | | | HSFMESSQSKAGTLQPNEKQSRHSYIDTIPQSSRSPS |
| | | | YRTKAKSHGALSDSKSVSNLSEARAQIAEPSTSRYFP |
| | | | SSCLDLNSPTSPTPTRHSDTRTLLSPSGRNNRNEGTL |
| | | | DSRRTTTRHSKTMEELKLPEHMDSSHSHSLSAPHESF |
| | | | SYGLGYTSPFSSQQRPHRHSMYVTRDKVRAKGLDGSL |
| | | | SIGQGMAARANSLQLLSPQPGEQLPPEMTVARSSVKE |
| | | | TSREGTSSFHTRQKSEGGVYHDPHSDDGTAPKENRHL |
| | | | YNDPVPRRVGSFYRVPSPRPDNSFHENNVSTRVSSLP |
| | | | SESSSGTNHSKRQPAFDPWKSPENISHSEQLKEKEKQ |
| | | | GFFRSMKKKKKKSQTVPNSDSPDLLTLQKSIHSASTP |
| | | | SSRPKEWRPEKISDLQTQSQPLKSLRKLLHLSSASNH |
| | | | PASSDPRFQPLTAQQTKNSFSEIRIHPLSQASGGSSN |
| | | | IRQEPAPKGRPALQLPGQMDPGWHVSSVTRSATEGPS |
| | | | YSEQLGAKSGPNGHPYNRTNRSRMPNLNDLKETAL |
| Copper- | Wilson disease | 222 | MPEQERQITAREGASRKILSKLSLPTRAWEPAMKKSF |
| transporting | | | AFDNVGYEGGLDGLGPSSQVATSTVRILGMTCQSCVK |
| ATPase 2 | | | SIEDRISNLKGIISMKVSLEQGSATVKYVPSVVCLQQ |
| (ATP7B) | | | VCHQIGDMGFEASIAEGKAASWPSRSLPAQEAVVKLR |
| | | | VEGMTCQSCVSSIEGKVRKLQGVVRVKVSLSNQEAVI |
| | | | TYQPYLIQPEDLRDHVNDMGFEAAIKSKVAPLSLGPI |
| | | | DIERLQSTNPKRPLSSANQNENNSETLGHQGSHVVTL |
| | | | QLRIDGMHCKSCVLNIEENIGQLLGVQSIQVSLENKT |
| | | | AQVKYDPSCTSPVALQRAIEALPPGNEKVSLPDGAEG |
| | | | SGTDHRSSSSHSPGSPPRNQVQGTCSTTLIAIAGMTC |
| | | | ASCVHSIEGMISQLEGVQQISVSLAEGTATVLYNPSV |
| | | | ISPEELRAAIEDMGFEASVVSESCSTNPLGNHSAGNS |
| | | | MVQTTDGTPTSVQEVAPHTGRLPANHAPDILAKSPQS |
| | | | TRAVAPQKCFLQIKGMTCASCVSNIERNLQKEAGVLS |
| | | | VLVALMAGKAEIKYDPEVIQPLEIAQFIQDLGFEAAV |
| | | | MEDYAGSDGNIELTITGMTCASCVHNIESKLTRINGI |
| | | | TYASVALATSKALVKEDPEIIGPRDIIKIIEEIGFHA |
| | | | SLAQRNPNAHHLDHKMEIKQWKKSFLCSLVFGIPVMA |
| | | | LMIYMLIPSNEPHQSMVLDHNIIPGLSILNLIFFILC |
| | | | TFVQLLGGWYFYVQAYKSLRHRSANMDVLIVLATSIA |
| | | | YVYSLVILVVAVAEKAERSPVTFEDTPPMLFVFIALG |
| | | | RWLEHLAKSKTSEALAKLMSLQATEATVVTLGEDNLI |
| | | | IREEQVPMELVQRGDIVKVVPGGKFPVDGKVLEGNTM |
| | | | ADESLITGEAMPVTKKPGSTVIAGSINAHGSVLIKAT |
| | | | HVGNDTTLAQIVKLVEEAQMSKAPIQQLADRESGYFV |
| | | | PFIIIMSTLTLVVWIVIGFIDFGVVQRYFPNPNKHIS |
| | | | QTEVIIRFAFQTSITVLCIACPCSLGLATPTAVMVGT |
| | | | GVAAQNGILIKGGKPLEMAHKIKTVMEDKTGTITHGV |
| | | | PRVMRVLLLGDVATLPLRKVLAVVGTAEASSEHPLGV |
| | | | AVTKYCKEELGTETLGYCTDFQAVPGCGIGCKVSNVE |
| | | | GILAHSERPLSAPASHLNEAGSLPAEKDAVPQTESVL |
| | | | IGNREWLRRNGLTISSDVSDAMTDHEMKGQTAILVAI |
| | | | DGVLCGMIAIADAVKQEAALAVHTLQSMGVDVVLITG |
| | | | DNRKTARAIATQVGINKVFAEVLPSHKVAKVQELQNK |
| | | | GKKVAMVGDGVNDSPALAQADMGVAIGTGTDVAIEAA |
| | | | DVVLIRNDLLDVVASIHLSKRTVRRIRINLVLALIYN |
| | | | LVGIPIAAGVEMPIGIVLQPWMGSAAMAASSVSVVLS |
| | | | SLQLKCYKKPDLERYEAQAHGHMKPLTASQVSVHIGM |
| | | | DDRWRDSPRATPWDQVSYVSQVSLSSLTSDKPSRHSA |
| | | | AADDDGDKWSLLLNGRDEEQYI |
| Syntaxin- | STXBP1 | 223 | MAPIGLKAVVGEKIMHDVIKKVKKKGEWKVLVVDQLS |
| binding protein | Encephalopathy; | | MRMLSSCCKMTDIMTEGITIVEDINKRREPLPSLEAV |
| 1 (STXBP1) | Epileptic | | YLITPSEKSVHSLISDEKDPPTAKYRAAHVFFTDSCP |
| | encephalopathy, | | DALFNELVKSRAAKVIKTLTEINIAFLPYESQVYSLD |
| | early infantile, | | SADSFQSFYSPHKAQMKNPILERLAEQIATLCATLKE |
| | Type 4 | | YPAVRYRGEYKDNALLAQLIQDKLDAYKADDPTMGEG |
| | | | PDKARSQLLILDRGFDPSSPVLHELTFQAMSYDLLPI |
| | | | ENDVYKYETSGIGEARVKEVLLDEDDDLWIALRHKHI |
| | | | AEVSQEVTRSLKDESSSKRMNTGEKTTMRDLSQMLKK |
| | | | MPQYQKELSKYSTHLHLAEDCMKHYQGTVDKLCRVEQ |
| | | | DLAMGTDAEGEKIKDPMRAIVPILLDANVSTYDKIRI |
| | | | ILLYIFLKNGITEENLNKLIQHAQIPPEDSEIITNMA |
| | | | HLGVPIVTDSTLRRRSKPERKERISEQTYQLSRWTPI |
| | | | IKDIMEDTIEDKLDTKHYPYISTRSSASESTTAVSAR |
| | | | YGHWHKNKAPGEYRSGPRLIIFILGGVSLNEMRCAYE |
| | | | VTQANGKWEVLIGSTHILTPQKLLDTLKKLNKTDEEI |
| | | | SS |
| Ras/Rap | SYNGAP1 | 224 | MSRSRASIHRGSIPAMSYAPFRDVRGPSMHRTQYVHS |
| GTPase- | Encephalopathy; | | PYDRPGWNPRECIISGNQLLMLDEDEIHPLLIRDRRS |
| activating | Mental | | ESSRNKLLRRTVSVPVEGRPHGEHEYHLGRSRRKSVP |
| protein | retardation, | | GGKQYSMEGAPAAPFRPSQGELSRRLKSSIKRTKSQP |
| (SYNGAP1) | autosomal | | KLDRTSSFRQILPRERSADHDRARLMQSFKESHSHES |
| | dominant 5 | | LLSPSSAAEALELNLDEDSIIKPVHSSILGQEFCFEV |
| | | | TTSSGTKCFACRSAAERDKWIENLQRAVKPNKDNSRR |
| | | | VDNVLKLWIIEARELPPKKRYYCELCLDDMLYARTTS |
| | | | KPRSASGDTVFWGEHFEENNLPAVRALRLHLYRDSDK |
| | | | KRKKDKAGYVGLVTVPVATLAGRHFTEQWYPVTLPTG |
| | | | SGGSGGMGSGGGGGSGGGSGGKGKGGCPAVRLKARYQ |
| | | | TMSILPMELYKEFAEYVTNHYRMLCAVLEPALNVKGK |
| | | | EEVASALVHILQSTGKAKDELSDMAMSEVDREMEREH |
| | | | LIFRENTLATKAIEEYMRLIGQKYLKDAIGEFIRALY |
| | | | ESEENCEVDPIKCTASSLAEHQANLRMCCELALCKVV |
| | | | NSHCVFPRELKEVFASWRLRCAERGREDIADRLISAS |
| | | | LFLRFLCPAIMSPSLFGLMQEYPDEQTSRTLTLIAKV |
| | | | IQNLANFSKFTSKEDELGEMNEFLELEWGSMQQFLYE |
| | | | ISNLDTLTNSSSFEGYIDLGRELSTLHALLWEVLPQL |
| | | | SKEALLKLGPLPRLLNDISTALRNPNIQRQPSRQSER |
| | | | PRPQPVVLRGPSAEMQGYMMRDLNSSIDLQSEMARGL |
| | | | NSSMDMARLPSPTKEKPPPPPPGGGKDLFYVSRPPLA |
| | | | RSSPAYCTSSSDITEPEQKMLSVNKSVSMLDLQGDGP |
| | | | GGRLNSSSVSNLAAVGDLLHSSQASLTAALGLRPAPA |
| | | | GRLSQGSGSSITAAGMRLSQMGVTTDGVPAQQLRIPL |
| | | | SFQNPLFHMAADGPGPPGGHGGGGGHGPPSSHHHHHH |
| | | | HHHHRGGEPPGDTFAPFHGYSKSEDLSSGVPKPPAAS |
| | | | ILHSHSYSDEFGPSGTDFTRRQLSLQDNLQHMLSPPQ |
| | | | ITIGPQRPAPSGPGGGSGGGSGGGGGGQPPPLQRGKS |
| | | | QQLTVSAAQKPRPSSGNLLQSPEPSYGPARPRQQSLS |
| | | | KEGSIGGSGGSGGGGGGGLKPSITKQHSQTPSTLNPT |
| | | | MPASERTVAWVSNMPHLSADIESAHIEREEYKLKEYS |
| | | | KSMDESRLDRVKEYEEEIHSLKERLHMSNRKLEEYER |
| | | | RLLSQEEQTSKILMQYQARLEQSEKRLRQQQAEKDSQ |
| | | | IKSIIGRLMLVEEELRRDHPAMAEPLPEPKKRLLDAQ |
| | | | ERQLPPLGPTNPRVTLAPPWNGLAPPAPPPPPRLQIT |
| | | | ENGEFRNTADH |
| Progranulin | Aphasia, | 225 | MWTLVSWVALTAGLVAGTRCPDGQFCPVACCLDPGGA |
| (GRN) | primary | | SYSCCRPLLDKWPTTLSRHLGGPCQVDAHCSAGHSCI |
| | progressive & | | FTVSGTSSCCPFPEAVACGDGHHCCPRGFHCSADGRS |
| | FTD | | CFQRSGNNSVGAIQCPDSQFECPDFSTCCVMVDGSWG |
| | | | CCPMPQASCCEDRVHCCPHGAFCDLVHTRCITPTGTH |
| | | | PLAKKLPAQRTNRAVALSSSVMCPDARSRCPDGSTCC |
| | | | ELPSGKYGCCPMPNATCCSDHLHCCPQDTVCDLIQSK |
| | | | CLSKENATTDLLTKLPAHTVGDVKCDMEVSCPDGYTC |
| | | | CRLQSGAWGCCPFTQAVCCEDHIHCCPAGETCDTQKG |
| | | | TCEQGPHQVPWMEKAPAHLSLPDPQALKRDVPCDNVS |
| | | | SCPSSDTCCQLTSGEWGCCPIPEAVCCSDHQHCCPQG |
| | | | YTCVAEGQCQRGSEIVAGLEKMPARRASLSHPRDIGC |
| | | | DQHTSCPVGQTCCPSLGGSWACCQLPHAVCCEDRQHC |
| | | | CPAGYTCNVKARSCEKEVVSAQPATFLARSPHVGVKD |
| | | | VECGEGHFCHDNQTCCRDNRQGWACCPYRQGVCCADR |
| | | | RHCCPAGERCAARGTKCLRREAPRWDAPLRDPALRQL |
| | | | I |
| Protein jagged- | Alagille | 226 | MRSPRTRGRSGRPLSLLLALLCALRAKVCGASGQFEL |
| 1 | syndrome 1 | | EILSMQNVNGELQNGNCCGGARNPGDRKCTRDECDTY |
| (JAG1) | | | FKVCLKEYQSRVTAGGPCSFGSGSTPVIGGNTENLKA |
| | | | SRGNDRNRIVLPFSFAWPRSYTLLVEAWDSSNDTVQP |
| | | | DSIIEKASHSGMINPSRQWQTLKQNTGVAHFEYQIRV |
| | | | TCDDYYYGFGCNKFCRPRDDFFGHYACDQNGNKTCME |
| | | | GWMGPECNRAICRQGCSPKHGSCKLPGDCRCQYGWQG |
| | | | LYCDKCIPHPGCVHGICNEPWQCLCETNWGGQLCDKD |
| | | | LNYCGTHQPCLNGGTCSNTGPDKYQCSCPEGYSGPNC |
| | | | EIAEHACLSDPCHNRGSCKETSLGFECECSPGWTGPT |
| | | | CSTNIDDCSPNNCSHGGTCQDLVNGFKCVCPPQWTGK |
| | | | TCQLDANECEAKPCVNAKSCKNLIASYYCDCLPGWMG |
| | | | QNCDININDCLGQCQNDASCRDLVNGYRCICPPGYAG |
| | | | DHCERDIDECASNPCLNGGHCQNEINRFQCLCPTGFS |
| | | | GNLCQLDIDYCEPNPCQNGAQCYNRASDYFCKCPEDY |
| | | | EGKNCSHLKDHCRTTPCEVIDSCTVAMASNDTPEGVR |
| | | | YISSNVCGPHGKCKSQSGGKFTCDCNKGFTGTYCHEN |
| | | | INDCESNPCRNGGTCIDGVNSYKCICSDGWEGAYCET |
| | | | NINDCSQNPCHNGGTCRDLVNDFYCDCKNGWKGKTCH |
| | | | SRDSQCDEATCNNGGTCYDEGDAFKCMCPGGWEGTTC |
| | | | NIARNSSCLPNPCHNGGTCVVNGESFTCVCKEGWEGP |
| | | | ICAQNTNDCSPHPCYNSGTCVDGDNWYRCECAPGFAG |
| | | | PDCRININECQSSPCAFGATCVDEINGYRCVCPPGHS |
| | | | GAKCQEVSGRPCITMGSVIPDGAKWDDDCNTCQCLNG |
| | | | RIACSKVWCGPRPCLLHKGHSECPSGQSCIPILDDQC |
| | | | FVHPCTGVGECRSSSLQPVKTKCTSDSYYQDNCANIT |
| | | | FTENKEMMSPGLTTEHICSELRNLNILKNVSAEYSIY |
| | | | IACEPSPSANNEIHVAISAEDIRDDGNPIKEITDKII |
| | | | DLVSKRDGNSSLIAAVAEVRVQRRPLKNRTDFLVPLL |
| | | | SSVLTVAWICCLVTAFYWCLRKRRKPGSHTHSASEDN |
| | | | TTNNVREQLNQIKNPIEKHGANTVPIKDYENKNSKMS |
| | | | KIRTHNSEVEEDDMDKHQQKARFAKQPAYTLVDREEK |
| | | | PPNGTPTKHPNWTNKQDNRDLESAQSLNRMEYIV |
| GATOR | Epilepsy, | 227 | MRTTKVYKLVIHKKGFGGSDDELVVNPKVFPHIKLGD |
| complex | familial focal, | | IVEIAHPNDEYSPLLLQVKSLKEDLQKETISVDQTVT |
| protein | with variable | | QVFRLRPYQDVYVNVVDPKDVTLDLVELTEKDQYIGR |
| DEPDC5 | foci 1 | | GDMWRLKKSLVSTCAYITQKVEFAGIRAQAGELWVKN |
| (DEPDC5) | | | EKVMCGYISEDTRVVFRSTSAMVYIFIQMSCEMWDED |
| | | | IYGDLYFEKAVNGFLADLFTKWKEKNCSHEVTVVLES |
| | | | RTFYDAKSVDEFPEINRASIRQDHKGRFYEDFYKVVV |
| | | | QNERREEWTSLLVTIKKLFIQYPVLVRLEQAEGFPQG |
| | | | DNSTSAQGNYLEAINLSENVEDKHYINRNEDRTGQMS |
| | | | VVITPGVGVFEVDRLLMILTKQRMIDNGIGVDLVCMG |
| | | | EQPLHAVPLFKLHNRSAPRDSRLGDDYNIPHWINHSE |
| | | | YTSKSQLFCNSFTPRIKLAGKKPASEKAKNGRDTSLG |
| | | | SPKESENALPIQVDYDAYDAQVERLPGPSRAQCLTTC |
| | | | RSVRERESHSRKSASSCDVSSSPSLPSRTLPTEEVRS |
| | | | QASDDSSLGKSANILMIPHPHLHQYEVSSSLGYTSTR |
| | | | DVLENMMEPPQRDSSAPGRFHVGSAESMLHVRPGGYT |
| | | | PQRALINPFAPSRMPMKLTSNRRRWMHTFPVGPSGEA |
| | | | IQIHHQTRQNMAELQGSGQRDPTHSSAELLELAYHEA |
| | | | AGRHSNSRQPGDGMSFLNFSGTEELSVGLLSNSGAGM |
| | | | NPRTQNKDSLEDSVSTSPDPILTLSAPPVVPGFCCTV |
| | | | GVDWKSLTTPACLPLTTDYFPDRQGLQNDYTEGCYDL |
| | | | LPEADIDRRDEDGVQMTAQQVFEEFICQRLMQGYQII |
| | | | VQPKTQKPNPAVPPPLSSSPLYSRGLVSRNRPEEEDQ |
| | | | YWLSMGRTFHKVTLKDKMITVTRYLPKYPYESAQIHY |
| | | | TYSLCPSHSDSEFVSCWVEFSHERLEEYKWNYLDQYI |
| | | | CSAGSEDESLIESLKFWRTRFLLLPACVTATKRITEG |
| | | | EAHCDIYGDRPRADEDEWQLLDGFVREVEGLNRIRRR |
| | | | HRSDRMMRKGTAMKGLQMTGPISTHSLESTAPPVGKK |
| | | | GTSALSALLEMEASQKCLGEQQAAVHGGKSSAQSAES |
| | | | SSVAMTPTYMDSPRKDGAFFMEFVRSPRTASSAFYPQ |
| | | | VSVDQTATPMLDGTSLGICTGQSMDRGNSQTEGNSQN |
| | | | IGEQGYSSTNSSDSSSQQLVASSLTSSSTLTEILEAM |
| | | | KHPSTGVQLLSEQKGLSPYCFISAEVVHWLVNHVEGI |
| | | | QTQAMAIDIMQKMLEEQLITHASGEAWRTFIYGFYFY |
| | | | KIVTDKEPDRVAMQQPATTWHTAGVDDFASFQRKWFE |
| | | | VAFVAEELVHSEIPAFLLPWLPSRPASYASRHSSFSR |
| | | | SFGGRSQAAALLAATVPEQRTVTLDVDVNNRTDRLEW |
| | | | CSCYYHGNESLNAAFEIKLHWMAVTAAVLFEMVQGWH |
| | | | RKATSCGFLLVPVLEGPFALPSYLYGDPLRAQLFIPL |
| | | | NISCLLKEGSEHLEDSFEPETYWDRMHLFQEAIAHREF |
| | | | GFVQDKYSASAFNFPAENKPQYIHVTGTVFLQLPYSK |
| | | | RKFSGQQRRRRNSTSSTNQNMFCEERVGYNWAYNTML |
| | | | TKTWRSSATGDEKFADRLLKDFTDFCINRDNRLVTEW |
| | | | TSCLEKMHASAP |
| Tuberin | Tuberous | 228 | MAKPTSKDSGLKEKFKILLGLGTPRPNPRSAEGKQTE |
| (TSC2) | sclerosis-2 | | FIITAEILRELSMECGLNNRIRMIGQICEVAKTKKFE |
| | | | EHAVEALWKAVADLLQPERPLEARHAVLALLKAIVQG |
| | | | QGERLGVLRALFFKVIKDYPSNEDLHERLEVFKALTD |
| | | | NGRHITYLEEELADFVLQWMDVGLSSEFLLVLVNLVK |
| | | | FNSCYLDEYIARMVQMICLLCVRTASSVDIEVSLQVL |
| | | | DAVVCYNCLPAESLPLFIVTLCRTINVKELCEPCWKL |
| | | | MRNLLGTHLGHSAIYNMCHLMEDRAYMEDAPLLRGAV |
| | | | FFVGMALWGAHRLYSLRNSPTSVLPSFYQAMACPNEV |
| | | | VSYEIVLSITRLIKKYRKELQVVAWDILLNIIERLLQ |
| | | | QLQTLDSPELRTIVHDLLTTVEELCDQNEFHGSQERY |
| | | | FELVERCADQRPESSLLNLISYRAQSIHPAKDGWIQN |
| | | | LQALMERFERSESRGAVRIKVLDVLSFVLLINRQFYE |
| | | | EELINSVVISQLSHIPEDKDHQVRKLATQLLVDLAEG |
| | | | CHTHHENSLLDIIEKVMARSLSPPPELEERDVAAYSA |
| | | | SLEDVKTAVLGLLVILQTKLYTLPASHATRVYEMLVS |
| | | | HIQLHYKHSYTLPIASSIRLQAFDELLLLRADSLHRL |
| | | | GLPNKDGVVRFSPYCVCDYMEPERGSEKKTSGPLSPP |
| | | | TGPPGPAPAGPAVRLGSVPYSLLFRVLLQCLKQESDW |
| | | | KVLKLVLGRLPESLRYKVLIFTSPCSVDQLCSALCSM |
| | | | LSGPKTLERLRGAPEGFSRTDLHLAVVPVLTALISYH |
| | | | NYLDKTKQREMVYCLEQGLIHRCASQCVVALSICSVE |
| | | | MPDIIIKALPVLVVKLTHISATASMAVPLLEFLSTLA |
| | | | RLPHLYRNFAAEQYASVFAISLPYTNPSKENQYIVCL |
| | | | AHHVIAMWFIRCRLPFRKDFVPFITKGLRSNVLLSED |
| | | | DTPEKDSFRARSTSLNERPKSLRIARPPKQGLNNSPP |
| | | | VKEFKESSAAEAFRCRSISVSEHVVRSRIQTSLTSAS |
| | | | LGSADENSVAQADDSLKNLHLELTETCLDMMARYVES |
| | | | NFTAVPKRSPVGEFLLAGGRTKTWLVGNKLVTVTTSV |
| | | | GTGTRSLLGLDSGELQSGPESSSSPGVHVRQTKEAPA |
| | | | KLESQAGQQVSRGARDRVRSMSGGHGLRVGALDVPAS |
| | | | QFLGSATSPGPRTAPAAKPEKASAGTRVPVQEKINLA |
| | | | AYVPLLTQGWAEILVRRPTGNTSWLMSLENPLSPESS |
| | | | DINNMPLQELSNALMAAERFKEHRDTALYKSLSVPAA |
| | | | STAKPPPLPRSNTVASFSSLYQSSCQGQLHRSVSWAD |
| | | | SAVVMEEGSPGEVPVLVEPPGLEDVEAALGMDRRTDA |
| | | | YSRSSSVSSQEEKSLHAEELVGRGIPIERVVSSEGGR |
| | | | PSVDLSFQPSQPLSKSSSSPELQTLQDILGDPGDKAD |
| | | | VGRLSPEVKARSQSGTLDGESAAWSASGEDSRGQPEG |
| | | | PLPSSSPRSPSGLRPRGYTISDSAPSRRGKRVERDAL |
| | | | KSRATASNAEKVPGINPSFVFLQLYHSPFFGDESNKP |
| | | | ILLPNESQSFERSVQLLDQIPSYDTHKIAVLYVGEGQ |
| | | | SNSELAILSNEHGSYRYTEFLTGLGRLIELKDCQPDK |
| | | | VYLGGLDVCGEDGQFTYCWHDDIMQAVFHIATLMPTK |
| | | | DVDKHRCDKKRHLGNDFVSIVYNDSGEDEKLGTIKGQ |
| | | | FNFVHVIVTPLDYECNLVSLQCRKDMEGLVDTSVAKI |
| | | | VSDRNLPFVARQMALHANMASQVHHSRSNPTDIYPSK |
| | | | WIARLRHIKRLRQRICEEAAYSNPSLPLVHPPSHSKA |
| | | | PAQTPAEPTPGYEVGQRKRLISSVEDFTEFV |
| Hamartin | Tuberous | 229 | MAQQANVGELLAMLDSPMLGVRDDVTAVEKENLNSDR |
| (TSC1) | sclerosis-1 | | GPMLVNTLVDYYLETSSQPALHILTTLQEPHDKHLLD |
| | | | RINEYVGKAATRLSILSLLGHVIRLQPSWKHKLSQAP |
| | | | LLPSLLKCLKMDTDVVVLTTGVLVLITMLPMIPQSGK |
| | | | QHLLDFFDIFGRLSSWCLKKPGHVAEVYLVHLHASVY |
| | | | ALFHRLYGMYPCNEVSELRSHYSMKENLETFEEVVKP |
| | | | MMEHVRIHPELVTGSKDHELDPRRWKRLETHDVVIEC |
| | | | AKISLDPTEASYEDGYSVSHQISARFPHRSADVTTSP |
| | | | YADTQNSYGCATSTPYSTSRLMLLNMPGQLPQTLSSP |
| | | | STRLITEPPQATLWSPSMVCGMTTPPTSPGNVPPDLS |
| | | | HPYSKVFGTTAGGKGTPLGTPATSPPPAPLCHSDDYV |
| | | | HISLPQATVTPPRKEERMDSARPCLHRQHHLLNDRGS |
| | | | EEPPGSKGSVTLSDLPGFLGDLASEEDSIEKDKEEAA |
| | | | ISRELSEITTAEAEPVVPRGGFDSPFYRDSLPGSQRK |
| | | | THSAASSSQGASVNPEPLHSSLDKLGPDTPKQAFTPI |
| | | | DLPCGSADESPAGDRECQTSLETSIFTPSPCKIPPPT |
| | | | RVGFGSGQPPPYDHLFEVALPKTAHHFVIRKTEELLK |
| | | | KAKGNTEEDGVPSTSPMEVLDRLIQQGADAHSKELNK |
| | | | LPLPSKSVDWTHEGGSPPSDEIRTLRDQLLLLHNQLL |
| | | | YERFKRQQHALRNRRLLRKVIKAAALEEHNAAMKDQL |
| | | | KLQEKDIQMWKVSLQKEQARYNQLQEQRDTMVTKLHS |
| | | | QIRQLQHDREEFYNQSQELQTKLEDCRNMIAELRIEL |
| | | | KKANNKVCHTELLLSQVSQKLSNSESVQQQMEFLNRQ |
| | | | LLVLGEVNELYLEQLQNKHSDTTKEVEMMKAAYRKEL |
| | | | EKNRSHVLQQTQRLDTSQKRILELESHLAKKDHLLLE |
| | | | QKKYLEDVKLQARGQLQAAESRYEAQKRITQVFELEI |
| | | | LDLYGRLEKDGLLKKLEEEKAEAAEAAEERLDCCNDG |
| | | | CSDSMVGHNEEASGHNGETKTPRPSSARGSSGSRGGG |
| | | | GSSSSSSELSTPEKPPHQRAGPESSRWETTMGEASAS |
| | | | IPTTVGSLPSSKSFLGMKARELFRNKSESQCDEDGMT |
| | | | SSLSESLKTELGKDLGVEAKIPLNLDGPHPSPPTPDS |
| | | | VGQLHIMDYNETHHEHS |
| Kinesin-like | KIF1A- | 230 | MAGASVKVAVRVRPFNSREMSRDSKCIIQMSGSTTTI |
| protein KIF1A | Associated | | VNPKQPKETPKSFSFDYSYWSHTSPEDINYASQKQVY |
| (KIF1A) | Neurological | | RDIGEEMLQHAFEGYNVCIFAYGQTGAGKSYTMMGKQ |
| | Disorder | | EKDQQGIIPQLCEDLFSRINDTTNDNMSYSVEVSYME |
| | | | IYCERVRDLLNPKNKGNLRVREHPLLGPYVEDLSKLA |
| | | | VTSYNDIQDLMDSGNKARTVAATNMNETSSRSHAVEN |
| | | | IIFTQKRHDAETNITTEKVSKISLVDLAGSERADSTG |
| | | | AKGTRLKEGANINKSLTTLGKVISALAEMDSGPNKNK |
| | | | KKKKTDFIPYRDSVLTWLLRENLGGNSRTAMVAALSP |
| | | | ADINYDETLSTLRYADRAKQIRCNAVINEDPNNKLIR |
| | | | ELKDEVTRLRDLLYAQGLGDITDMTNALVGMSPSSSL |
| | | | SALSSRAASVSSLHERILFAPGSEEAIERLKETEKII |
| | | | AELNETWEEKLRRTEAIRMEREALLAEMGVAMREDGG |
| | | | TLGVFSPKKTPHLVNLNEDPLMSECLLYYIKDGITRV |
| | | | GREDGERRQDIVLSGHFIKEEHCVERSDSRGGSEAVV |
| | | | TLEPCEGADTYVNGKKVTEPSILRSGNRIIMGKSHVE |
| | | | RENHPEQARQERERTPCAETPAEPVDWAFAQRELLEK |
| | | | QGIDMKQEMEQRLQELEDQYRREREEATYLLEQQRLD |
| | | | YESKLEALQKQMDSRYYPEVNEEEEEPEDEVQWTERE |
| | | | CELALWAFRKWKWYQFTSLRDLLWGNAIFLKEANAIS |
| | | | VELKKKVQFQFVLLTDTLYSPLPPDLLPPEAAKDRET |
| | | | RPFPRTIVAVEVQDQKNGATHYWTLEKLRQRLDLMRE |
| | | | MYDRAAEVPSSVIEDCDNVVTGGDPFYDREPWERLVG |
| | | | RAFVYLSNLLYPVPLVHRVAIVSEKGEVKGELRVAVQ |
| | | | AISADEEAPDYGSGVRQSGTAKISEDDQHFEKFQSES |
| | | | CPVVGMSRSGTSQEELRIVEGQGQGADVGPSADEVNN |
| | | | NTCSAVPPEGLLLDSSEKAALDGPLDAALDHLRLGNT |
| | | | FTFRVTVLQASSISAEYADIFCQENFIHRHDEAESTE |
| | | | PLKNTGRGPPLGFYHVQNIAVEVTKSFIEYIKSQPIV |
| | | | FEVFGHYQQHPFPPLCKDVLSPLRPSRRHFPRVMPLS |
| | | | KPVPATKLSTLTRPCPGPCHCKYDLLVYFEICELEAN |
| | | | GDYIPAVVDHRGGMPCMGTFLLHQGIQRRITVTLLHE |
| | | | TGSHIRWKEVRELVVGRIRNTPETDESLIDPNILSLN |
| | | | ILSSGYIHPAQDDRTFYQFEAAWDSSMHNSLLLNRVT |
| | | | PYREKIYMTLSAYIEMENCTQPAVVTKDFCMVFYSRD |
| | | | AKLPASRSIRNLFGSGSLRASESNRVTGVYELSLCHV |
| | | | ADAGSPGMQRRRRRVLDTSVAYVRGEENLAGWRPRSD |
| | | | SLILDHQWELEKLSLLQEVEKTRHYLLLREKLETAQR |
| | | | PVPEALSPAFSEDSESHGSSSASSPLSAEGRPSPLEA |
| | | | PNERQRELAVKCLRLLTHTENREYTHSHVCVSASESK |
| | | | LSEMSVTLLRDPSMSPLGVATLTPSSTCPSLVEGRYG |
| | | | ATDLRTPQPCSRPASPEPELLPEADSKKLPSPARATE |
| | | | TDKEPQRLLVPDIQEIRVSPIVSKKGYLHFLEPHTSG |
| | | | WARRFVVVRRPYAYMYNSDKDTVERFVLNLATAQVEY |
| | | | SEDQQAMLKTPNTFAVCTEHRGILLQAASDKDMHDWL |
| | | | YAFNPLLAGTIRSKLSRRRSAQMRV |
| Dynamin-1 | Encephalopathy | 231 | MGNRGMEDLIPLVNRLQDAFSAIGQNADLDLPQIAVV |
| (DNM1) | | | GGQSAGKSSVLENFVGRDFLPRGSGIVTRRPLVLQLV |
| | | | NATTEYAEFLHCKGKKFTDFEEVRLEIEAETDRVTGT |
| | | | NKGISPVPINLRVYSPHVLNLTLVDLPGMTKVPVGDQ |
| | | | PPDIEFQIRDMLMQFVTKENCLILAVSPANSDLANSD |
| | | | ALKVAKEVDPQGQRTIGVITKLDLMDEGTDARDVLEN |
| | | | KLLPLRRGYIGVVNRSQKDIDGKKDITAALAAERKFF |
| | | | LSHPSYRHLADRMGTPYLQKVLNQQLTNHIRDTLPGL |
| | | | RNKLQSQLLSIEKEVEEYKNFRPDDPARKTKALLQMV |
| | | | QQFAVDFEKRIEGSGDQIDTYELSGGARINRIFHERF |
| | | | PFELVKMEFDEKELRREISYAIKNIHGIRTGLFTPDM |
| | | | AFETIVKKQVKKIREPCLKCVDMVISELISTVRQCTK |
| | | | KLQQYPRLREEMERIVTTHIREREGRTKEQVMLLIDI |
| | | | ELAYMNTNHEDFIGFANAQQRSNQMNKKKTSGNQDEI |
| | | | LVIRKGWLTINNIGIMKGGSKEYWFVLTAENLSWYKD |
| | | | DEEKEKKYMLSVDNLKLRDVEKGFMSSKHIFALENTE |
| | | | QRNVYKDYRQLELACETQEEVDSWKASFLRAGVYPER |
| | | | VGDKEKASETEENGSDSFMHSMDPQLERQVETIRNLV |
| | | | DSYMAIVNKTVRDLMPKTIMHLMINNTKEFIFSELLA |
| | | | NLYSCGDQNTLMEESAEQAQRRDEMLRMYHALKEALS |
| | | | IIGDINTTTVSTPMPPPVDDSWLQVQSVPAGRRSPTS |
| | | | SPTPQRRAPAVPPARPGSRGPAPGPPPAGSALGGAPP |
| | | | VPSRPGASPDPFGPPPQVPSRPNRAPPGVPSRSGQAS |
| | | | PSRPESPRPPEDL |
| SH3 and | Phelan- | 232 | MDGPGASAVVVRVGIPDLQQTKCLRLDPAAPVWAAKQ |
| multiple | McDermid | | RVLCALNHSLQDALNYGLFQPPSRGRAGKELDEERLL |
| ankyrin repeat | syndrome | | QEYPPNLDTPLPYLEFRYKRRVYAQNLIDDKQFAKLH |
| domains | | | TKANLKKFMDYVQLHSTDKVARLLDKGLDPNFHDPDS |
| protein 3 | | | GECPLSLAAQLDNATDLLKVLKNGGAHLDERTRDGLT |
| (SHANK3) | | | AVHCATRQRNAAALTTLLDLGASPDYKDSRGLTPLYH |
| | | | SALGGGDALCCELLLHDHAQLGITDENGWQEIHQACR |
| | | | FGHVQHLEHLLFYGADMGAQNASGNTALHICALYNQE |
| | | | SCARVLLFRGANRDVRNYNSQTAFQVAIIAGNFELAE |
| | | | VIKTHKDSDVVPFRETPSYAKRRRLAGPSGLASPRPL |
| | | | QRSASDINLKGEAQPAASPGPSLRSLPHQLLLQRLQE |
| | | | EKDRDRDADQESNISGPLAGRAGQSKISPSGPGGPGP |
| | | | APGPGPAPPAPPAPPPRGPKRKLYSAVPGRKFIAVKA |
| | | | HSPQGEGEIPLHRGEAVKVLSIGEGGFWEGTVKGRTG |
| | | | WFPADCVEEVQMRQHDTRPETREDRTKRLFRHYTVGS |
| | | | YDSLTSHSDYVIDDKVAVLQKRDHEGFGFVLRGAKAE |
| | | | TPIEEFTPTPAFPALQYLESVDVEGVAWRAGLRTGDF |
| | | | LIEVNGVNVVKVGHKQVVALIRQGGNRLVMKVVSVTR |
| | | | KPEEDGARRRAPPPPKRAPSTTLTLRSKSMTAELEEL |
| | | | ASIRRRKGEKLDEMLAAAAEPTLRPDIADADSRAATV |
| | | | KQRPTSRRITPAEISSLFERQGLPGPEKLPGSLRKGI |
| | | | PRTKSVGEDEKLASLLEGRFPRSTSMQDPVREGRGIP |
| | | | PPPQTAPPPPPAPYYFDSGPPPAFSPPPPPGRAYDTV |
| | | | RSSFKPGLEARLGAGAAGLYEPGAALGPLPYPERQKR |
| | | | ARSMIILQDSAPESGDAPRPPPAATPPERPKRRPRPP |
| | | | GPDSPYANLGAFSASLFAPSKPQRRKSPLVKQLQVED |
| | | | AQERAALAVGSPGPGGGSFAREPSPTHRGPRPGGLDY |
| | | | GAGDGPGLAFGGPGPAKDRRLEERRRSTVFLSVGAIE |
| | | | GSAPGADLPSLQPSRSIDERLLGTGPTAGRDLLLPSP |
| | | | VSALKPLVSGPSLGPSGSTFIHPLTGKPLDPSSPLAL |
| | | | ALAARERALASQAPSRSPTPVHSPDADRPGPLFVDVQ |
| | | | ARDPERGSLASPAFSPRSPAWIPVPARREAEKVPREE |
| | | | RKSPEDKKSMILSVLDTSLQRPAGLIVVHATSNGQEP |
| | | | SRLGGAEEERPGTPELAPAPMQSAAVAEPLPSPRAQP |
| | | | PGGTPADAGPGQGSSEEEPELVFAVNLPPAQLSSSDE |
| | | | ETREELARIGLVPPPEEFANGVLLATPLAGPGPSPTT |
| | | | VPSPASGKPSSEPPPAPESAADSGVEEADTRSSSDPH |
| | | | LETTSTISTVSSMSTLSSESGELTDTHTSFADGHTFL |
| | | | LEKPPVPPKPKLKSPLGKGPVTFRDPLLKQSSDSELM |
| | | | AQQHHAASAGLASAAGPARPRYLFQRRSKLWGDPVES |
| | | | RGLPGPEDDKPTVISELSSRLQQLNKDTRSLGEEPVG |
| | | | GLGSLLDPAKKSPIAAARLESSLGELSSISAQRSPGG |
| | | | PGGGASYSVRPSGRYPVARRAPSPVKPASLERVEGLG |
| | | | AGAGGAGRPFGLTPPTILKSSSLSIPHEPKEVRFVVR |
| | | | SVSARSRSPSPSPLPSPASGPGPGAPGPRRPFQQKPL |
| | | | QLWSKFDVGDWLESIHLGEHRDRFEDHEIEGAHLPAL |
| | | | TKDDFVELGVTRVGHRMNIERALRQLDGS |
| Dystrophin | Becker | 233 | MLWWEEVEDCYEREDVQKKTFTKWVNAQFSKFGKQHI |
| (DMD) | Muscular | | ENLFSDLQDGRRLLDLLEGLTGQKLPKEKGSTRVHAL |
| | Dystrophy | | NNVNKALRVLQNNNVDLVNIGSTDIVDGNHKLTLGLI |
| | | | WNIILHWQVKNVMKNIMAGLQQTNSEKILLSWVRQST |
| | | | RNYPQVNVINFTTSWSDGLALNALIHSHRPDLEDWNS |
| | | | VVCQQSATQRLEHAFNIARYQLGIEKLLDPEDVDTTY |
| | | | PDKKSILMYITSLFQVLPQQVSIEAIQEVEMLPRPPK |
| | | | VTKEEHFQLHHQMHYSQQITVSLAQGYERTSSPKPRF |
| | | | KSYAYTQAAYVTTSDPTRSPFPSQHLEAPEDKSEGSS |
| | | | LMESEVNLDRYQTALEEVLSWLLSAEDTLQAQGEISN |
| | | | DVEVVKDQFHTHEGYMMDLTAHQGRVGNILQLGSKLI |
| | | | GTGKLSEDEETEVQEQMNLLNSRWECLRVASMEKQSN |
| | | | LHRVLMDLQNQKLKELNDWLTKTEERTRKMEEEPLG |
| | | | PDLEDLKRQVQQHKVLQEDLEQEQVRVNSLTHMVVVV |
| | | | DESSGDHATAALEEQLKVLGDRWANICRWTEDRWVLL |
| | | | QDILLKWQRLTEEQCLFSAWLSEKEDAVNKIHTTGFK |
| | | | DQNEMLSSLQKLAVLKADLEKKKQSMGKLYSLKQDLL |
| | | | STLKNKSVTQKTEAWLDNFARCWDNLVQKLEKSTAQI |
| | | | SQAVTTTQPSLTQTTVMETVTTVTTREQILVKHAQEE |
| | | | LPPPPPQKKRQITVDSEIRKRLDVDITELHSWITRSE |
| | | | AVLQSPEFAIFRKEGNFSDLKEKVNAIEREKAEKFRK |
| | | | LQDASRSAQALVEQMVNEGVNADSIKQASEQLNSRWI |
| | | | EFCQLLSERLNWLEYQNNIIAFYNQLQQLEQMTTTAE |
| | | | NWLKIQPTTPSEPTAIKSQLKICKDEVNRLSDLQPQI |
| | | | ERLKIQSIALKEKGQGPMELDADEVAFTNHFKQVESD |
| | | | VQAREKELQTIFDTLPPMRYQETMSAIRTWVQQSETK |
| | | | LSIPQLSVTDYEIMEQRLGELQALQSSLQEQQSGLYY |
| | | | LSTTVKEMSKKAPSEISRKYQSEFEEIEGRWKKLSSQ |
| | | | LVEHCQKLEEQMNKLRKIQNHIQTLKKWMAEVDVELK |
| | | | EEWPALGDSEILKKQLKQCRLLVSDIQTIQPSLNSVN |
| | | | EGGQKIKNEAEPEFASRLETELKELNTQWDHMCQQVY |
| | | | ARKEALKGGLEKTVSLQKDLSEMHEWMTQAEEEYLER |
| | | | DFEYKTPDELQKAVEEMKRAKEEAQQKEAKVKLLTES |
| | | | VNSVIAQAPPVAQEALKKELETLTTNYQWLCTRLNGK |
| | | | CKTLEEVWACWHELLSYLEKANKWLNEVEFKLKTTEN |
| | | | IPGGAEEISEVLDSLENLMRHSEDNPNQIRILAQTLT |
| | | | DGGVMDELINEELETENSRWRELHEEAVRRQKLLEQS |
| | | | IQSAQETEKSLHLIQESLTFIDKQLAAYIADKVDAAQ |
| | | | MPQEAQKIQSDLTSHEISLEEMKKHNQGKEAAQRVLS |
| | | | QIDVAQKKLQDVSMKFRLFQKPANFEQRLQESKMILD |
| | | | EVKMHLPALETKSVEQEVVQSQLNHCVNLYKSLSEVK |
| | | | SEVEMVIKTGRQIVQKKQTENPKELDERVTALKLHYN |
| | | | ELGAKVTERKQQLEKCLKLSRKMRKEMNVLTEWLAAT |
| | | | DMELTKRSAVEGMPSNLDSEVAWGKATQKEIEKQKVH |
| | | | LKSITEVGEALKTVLGKKETLVEDKLSLLNSNWIAVT |
| | | | SRAEEWLNLLLEYQKHMETFDQNVDHITKWIIQADTL |
| | | | LDESEKKKPQQKEDVLKRLKAELNDIRPKVDSTRDQA |
| | | | ANLMANRGDHCRKLVEPQISELNHRFAAISHRIKTGK |
| | | | ASIPLKELEQFNSDIQKLLEPLEAEIQQGVNLKEEDE |
| | | | NKDMNEDNEGTVKELLQRGDNLQQRITDERKREEIKI |
| | | | KQQLLQTKHNALKDLRSQRRKKALEISHQWYQYKRQA |
| | | | DDLLKCLDDIEKKLASLPEPRDERKIKEIDRELQKKK |
| | | | EELNAVRRQAEGLSEDGAAMAVEPTQIQLSKRWREIE |
| | | | SKFAQFRRLNFAQIHTVREETMMVMTEDMPLEISYVP |
| | | | STYLTEITHVSQALLEVEQLLNAPDLCAKDFEDLEKQ |
| | | | EESLKNIKDSLQQSSGRIDIIHSKKTAALQSATPVER |
| | | | VKLQEALSQLDFQWEKVNKMYKDRQGRFDRSVEKWRR |
| | | | FHYDIKIFNQWLTEAEQFLRKTQIPENWEHAKYKWYL |
| | | | KELQDGIGQRQTVVRTLNATGEEIIQQSSKTDASILQ |
| | | | EKLGSLNLRWQEVCKQLSDRKKRLEEQKNILSEFQRD |
| | | | LNEFVLWLEEADNIASIPLEPGKEQQLKEKLEQVKLL |
| | | | VEELPLRQGILKQLNETGGPVLVSAPISPEEQDKLEN |
| | | | KLKQTNLQWIKVSRALPEKQGEIEAQIKDLGQLEKKL |
| | | | EDLEEQLNHLLLWLSPIRNQLEIYNQPNQEGPEDVKE |
| | | | TEIAVQAKQPDVEEILSKGQHLYKEKPATQPVKRKLE |
| | | | DLSSEWKAVNRLLQELRAKQPDLAPGLTTIGASPTQT |
| | | | VTLVTQPVVTKETAISKLEMPSSLMLEVPALADENRA |
| | | | WTELTDWLSLLDQVIKSQRVMVGDLEDINEMIIKQKA |
| | | | TMQDLEQRRPQLEELITAAQNLKNKTSNQEARTIITD |
| | | | RIERIQNQWDEVQEHLQNRRQQLNEMLKDSTQWLEAK |
| | | | EEAEQVLGQARAKLESWKEGPYTVDAIQKKITETKQL |
| | | | AKDLRQWQTNVDVANDLALKLLRDYSADDTRKVHMIT |
| | | | ENINASWRSIHKRVSEREAALEETHRLLQQFPLDLEK |
| | | | FLAWLTEAETTANVLQDATRKERLLEDSKGVKELMKQ |
| | | | WQDLQGEIEAHTDVYHNLDENSQKILRSLEGSDDAVL |
| | | | LQRRLDNMNFKWSELRKKSLNIRSHLEASSDQWKRLH |
| | | | LSLQELLVWLQLKDDELSRQAPIGGDEPAVQKQNDVH |
| | | | RAFKRELKTKEPVIMSTLETVRIFLTEQPLEGLEKLY |
| | | | QEPRELPPEERAQNVTRLLRKQAEEVNTEWEKLNLHS |
| | | | ADWQRKIDETLERLQELQEATDELDLKLRQAEVIKGS |
| | | | WQPVGDLLIDSLQDHLEKVKALRGEIAPLKENVSHVN |
| | | | DLARQLTTLGIQLSPYNLSTLEDLNTRWKLLQVAVED |
| | | | RVRQLHEAHRDFGPASQHELSTSVQGPWERAISPNKV |
| | | | PYYINHETQTTCWDHPKMTELYQSLADLNNVRESAYR |
| | | | TAMKLRRLQKALCLDLLSLSAACDALDQHNLKQNDQP |
| | | | MDILQIINCLTTIYDRLEQEHNNLVNVPLCVDMCLNW |
| | | | LLNVYDTGRTGRIRVLSFKTGIISLCKAHLEDKYRYL |
| | | | FKQVASSTGFCDQRRLGLLLHDSIQIPRQLGEVASFG |
| | | | GSNIEPSVRSCFQFANNKPEIEAALFLDWMRLEPQSM |
| | | | VWLPVLHRVAAAETAKHQAKCNICKECPIIGFRYRSL |
| | | | KHFNYDICQSCFFSGRVAKGHKMHYPMVEYCTPTTSG |
| | | | EDVRDFAKVLKNKERTKRYFAKHPRMGYLPVQTVLEG |
| | | | DNMETPVTLINFWPVDSAPASSPQLSHDDTHSRIEHY |
| | | | ASRLAEMENSNGSYLNDSISPNESIDDEHLLIQHYCQ |
| | | | SLNQDSPLSQPRSPAQILISLESEERGELERILADLE |
| | | | EENRNLQAEYDRLKQQHEHKGLSPLPSPPEMMPTSPQ |
| | | | SPRDAELIAEAKLLRQHKGRLEARMQILEDHNKQLES |
| | | | QLHRLRQLLEQPQAEAKVNGTTVSSPSTSLQRSDSSQ |
| | | | PMLLRVVGSQTSDSMGEEDLLSPPQDTSTGLEEVMEQ |
| | | | LNNSFPSSRGRNTPGKPMREDTM |
| Oxygen- | Retinitis | 234 | MSDTPSTGFSIIHPTSSEGQVPPPRHLSLTHPVVAKR |
| regulated | Pigmentosa 1 | | ISFYKSGDPQFGGVRVVVNPRSEKSFDALLDNLSRKV |
| protein 1 | | | PLPFGVRNISTPRGRHSITRLEELEDGESYLCSHGRK |
| (RP1) | | | VQPVDLDKARRRPRPWLSSRAISAHSPPHPVAVAAPG |
| | | | MPRPPRSLVVERNGDPKTRRAVLLSRRVTQSFEAFLQ |
| | | | HLTEVMQRPVVKLYATDGRRVPSLQAVILSSGAVVAA |
| | | | GREPFKPGNYDIQKYLLPARLPGISQRVYPKGNAKSE |
| | | | SRKISTHMSSSSRSQIYSVSSEKTHNNDCYLDYSFVP |
| | | | EKYLALEKNDSQNLPIYPSEDDIEKSIIFNQDGTMTV |
| | | | EMKVRFRIKEEETIKWTTTVSKTGPSNNDEKSEMSFP |
| | | | GRTESRSSGLKLAACSFSADVSPMERSSNQEGSLAEE |
| | | | INIQMTDQVAETCSSASWENATVDTDIIQGTQDQAKH |
| | | | RFYRPPTPGLRRVRQKKSVIGSVTLVSETEVQEKMIG |
| | | | QFSYSEERESGENKSEYHMFTHSCSKMSSVSNKPVLV |
| | | | QINNNDQMEESSLERKKENSLLKSSAISAGVIEITSQ |
| | | | KMLEMSHNNGLPSTISNNSIVEEDVVDCVVLDNKTGI |
| | | | KNFKTYGNTNDRESPISADATHESSNNSGTDKNISEA |
| | | | PASEASSTVTARIDRLINEFAQCGLTKLPKNEKKILS |
| | | | SVASKKKKKSRQQAINSRYQDGQLATKGILNKNERIN |
| | | | TKGRITKEMIVQDSDSPLKGGILCEEDLQKSDTVIES |
| | | | NTFCSKSNLNSTISKNFHRNKLNTTQNSKVQGLLTKR |
| | | | KSRSLNKISLGAPKKREIGQRDKVFPHNESKYCKSTF |
| | | | ENKSLFHVENILEQKPKDFYAPQSQAEVASGYLRGMA |
| | | | KKSLVSKVTDSHITLKSQKKRKGDKVKASAILSKQHA |
| | | | TTRANSLASLKKPDFPEAIAHHSIQNYIQSWLQNINP |
| | | | YPTLKPIKSAPVCRNETSVVNCSNNSFSGNDPHTNSG |
| | | | KISNFVMESNKHITKIAGLTGDNLCKEGDKSFIANDT |
| | | | GEEDLHETQVGSLNDAYLVPLHEHCTLSQSAINDHNT |
| | | | KSHIAAEKSGPEKKLVYQEINLARKRQSVEAAIQVDP |
| | | | IEEETPKDLLPVLMLHQLQASVPGIHKTQNGVVQMPG |
| | | | SLAGVPFHSAICNSSTNLLLAWLLVLNLKGSMNSFCQ |
| | | | VDAHKATNKSSETLALLEILKHIAITEEADDLKAAVA |
| | | | NLVESTTSHFGLSEKEQDMVPIDLSANCSTVNIQSVP |
| | | | KCSENERTQGISSLDGGCSASEACAPEVCVLEVTCSP |
| | | | CEMCTVNKAYSPKETCNPSDTFFPSDGYGVDQTSMNK |
| | | | ACFLGEVCSLTDTVESDKACAQKENHTYEGACPIDET |
| | | | YVPVNVCNTIDELNSKENTYTDNLDSTEELERGDDIQ |
| | | | KDLNILTDPEYKNGFNTLVSHQNVSNLSSCGLCLSEK |
| | | | EAELDKKHSSLDDFENCSLRKFQDENAYTSEDMEEPR |
| | | | TSEEPGSITNSMTSSERNISELESFEELENHDTDIEN |
| | | | TVVNGGEQATEELIQEEVEASKTLELIDISSKNIMEE |
| | | | KRMNGIIYEIISKRLATPPSLDFCYDSKQNSEKETNE |
| | | | GETKMVKMMVKTMETGSYSESSPDLKKCIKSPVTSDW |
| | | | SDYRPDSDSEQPYKTSSDDPNDSGELTQEKEYNIGFV |
| | | | KRAIEKLYGKADIIKPSFFPGSTRKSQVCPYNSVEFQ |
| | | | CSRKASLYDSEGQSFGSSEQVSSSSSMLQEFQEERQD |
| | | | KCDVSAVRDNYCRGDIVEPGTKQNDDSRILTDIEEGV |
| | | | LIDKGKWLLKENHLLRMSSENPGMCGNADTTSVDTLL |
| | | | DNNSSEVPYSHFGNLAPGPTMDELSSSELEELTQPLE |
| | | | LKCNYFNMPHGSDSEPFHEDLLDVRNETCAKERIANH |
| | | | HTEEKGSHQSERVCTSVTHSFISAGNKVYPVSDDAIK |
| | | | NQPLPGSNMIHGTLQEADSLDKLYALCGQHCPILTVI |
| | | | IQPMNEEDRGFAYRKESDIENFLGFYLWMKIHPYLLQ |
| | | | TDKNVFREENNKASMRQNLIDNAIGDIFDQFYFSNTE |
| | | | DLMGKRRKQKRINFLGLEEEGNLKKFQPDLKERFCMN |
| | | | FLHTSLLVVGNVDSNTQDLSGQTNEIFKAVDENNNLL |
| | | | NNRFQGSRTNLNQVVRENINCHYFFEMLGQACLLDIC |
| | | | QVETSLNISNRNILELCMFEGENLFIWEEEDILNLTD |
| | | | LESSREQEDL |
| Titin | Dilated | 235 | MTTQAPTFTQPLQSVVVLEGSTATFEAHISGFPVPEV |
| (TTN) | Cardiomyopathy | | SWFRDGQVISTSTLPGVQISFSDGRAKLTIPAVTKAN |
| | 1G | | SGRYSLKATNGSGQATSTAELLVKAETAPPNFVQRLQ |
| | | | SMTVRQGSQVRLQVRVTGIPTPVVKFYRDGAEIQSSL |
| | | | DFQISQEGDLYSLLIAEAYPEDSGTYSVNATNSVGRA |
| | | | TSTAELLVQGEEEVPAKKTKTIVSTAQISESRQTRIE |
| | | | KKIEAHFDARSIATVEMVIDGAAGQQLPHKTPPRIPP |
| | | | KPKSRSPTPPSIAAKAQLARQQSPSPIRHSPSPVRHV |
| | | | RAPTPSPVRSVSPAARISTSPIRSVRSPLLMRKTQAS |
| | | | TVATGPEVPPPWKQEGYVASSSEAEMRETTLTTSTQI |
| | | | RTEERWEGRYGVQEQVTISGAAGAAASVSASASYAAE |
| | | | AVATGAKEVKQDADKSAAVATVVAAVDMARVREPVIS |
| | | | AVEQTAQRTTTTAVHIQPAQEQVRKEAEKTAVTKVVV |
| | | | AADKAKEQELKSRTKEVITTKQEQMHVTHEQIRKETE |
| | | | KTFVPKVVISAAKAKEQETRISEEITKKQKQVTQEAI |
| | | | RQETEITAASMVVVATAKSTKLETVPGAQEETTTQQD |
| | | | QMHLSYEKIMKETRKTVVPKVIVATPKVKEQDLVSRG |
| | | | REGITTKREQVQITQEKMRKEAEKTALSTIAVATAKA |
| | | | KEQETILRTRETMATRQEQIQVTHGKVDVGKKAEAVA |
| | | | TVVAAVDQARVREPREPGHLEESYAQQTTLEYGYKER |
| | | | ISAAKVAEPPQRPASEPHVVPKAVKPRVIQAPSETHI |
| | | | KTTDQKGMHISSQIKKTTDLTTERLVHVDKRPRTASP |
| | | | HFTVSKISVPKTEHGYEASIAGSAIATLQKELSATSS |
| | | | AQKITKSVKAPTVKPSETRVRAEPTPLPQFPFADTPD |
| | | | TYKSEAGVEVKKEVGVSITGTTVREERFEVLHGREAK |
| | | | VTETARVPAPVEIPVTPPTLVSGLKNVTVIEGESVTL |
| | | | ECHISGYPSPTVTWYREDYQIESSIDFQITFQSGIAR |
| | | | LMIREAFAEDSGRFTCSAVNEAGTVSTSCYLAVQVSE |
| | | | EFEKETTAVTEKFTTEEKREVESRDVVMTDTSLTEEQ |
| | | | AGPGEPAAPYFITKPVVQKLVEGGSVVFGCQVGGNPK |
| | | | PHVYWKKSGVPLTTGYRYKVSYNKQTGECKLVISMTF |
| | | | ADDAGEYTIVVRNKHGETSASASLLEEADYELLMKSQ |
| | | | QEMLYQTQVTAFVQEPKVGETAPGFVYSEYEKEYEKE |
| | | | QALIRKKMAKDTVVVRTYVEDQEFHISSFEERLIKEI |
| | | | EYRIIKTTLEELLEEDGEEKMAVDISESEAVESGEDS |
| | | | RIKNYRILEGMGVTFHCKMSGYPLPKIAWYKDGKRIK |
| | | | HGERYQMDFLQDGRASLRIPVVLPEDEGIYTAFASNI |
| | | | KGNAICSGKLYVEPAAPLGAPTYIPTLEPVSRIRSLS |
| | | | PRSVSRSPIRMSPARMSPARMSPARMSPARMSPGRRL |
| | | | EETDESQLERLYKPVFVLKPVSFKCLEGQTARFDLKV |
| | | | VGRPMPETFWFHDGQQIVNDYTHKVVIKEDGTQSLII |
| | | | VPATPSDSGEWTVVAQNRAGRSSISVILTVEAVEHQV |
| | | | KPMFVEKLKNVNIKEGSRLEMKVRATGNPNPDIVWLK |
| | | | NSDIIVPHKYPKIRIEGTKGEAALKIDSTVSQDSAWY |
| | | | TATAINKAGRDTTRCKVNVEVEFAEPEPERKLIIPRG |
| | | | TYRAKEIAAPELEPLHLRYGQEQWEEGDLYDKEKQQK |
| | | | PFFKKKLTSLRLKRFGPAHFECRLTPIGDPTMVVEWL |
| | | | HDGKPLEAANRLRMINEFGYCSLDYGVAYSRDSGIIT |
| | | | CRATNKYGTDHTSATLIVKDEKSLVEESQLPEGRKGL |
| | | | QRIEELERMAHEGALTGVTTDQKEKQKPDIVLYPEPV |
| | | | RVLEGETARFRCRVTGYPQPKVNWYLNGQLIRKSKRF |
| | | | RVRYDGIHYLDIVDCKSYDTGEVKVTAENPEGVIEHK |
| | | | VKLEIQQREDERSVLRRAPEPRPEFHVHEPGKLQFEV |
| | | | QKVDRPVDTTETKEVVKLKRAERITHEKVPEESEELR |
| | | | SKFKRRTEEGYYEAITAVELKSRKKDESYEELLRKTK |
| | | | DELLHWTKELTEEEKKALAEEGKITIPTFKPDKIELS |
| | | | PSMEAPKIFERIQSQTVGQGSDAHERVRVVGKPDPEC |
| | | | EWYKNGVKIERSDRIYWYWPEDNVCELVIRDVTAEDS |
| | | | ASIMVKAINIAGETSSHAFLLVQAKQLITFTQELQDV |
| | | | VAKEKDTMATFECETSEPFVKVKWYKDGMEVHEGDKY |
| | | | RMHSDRKVHELSILTIDTSDAEDYSCVLVEDENVKTT |
| | | | AKLIVEGAVVEFVKELQDIEVPESYSGELECIVSPEN |
| | | | IEGKWYHNDVELKSNGKYTITSRRGRQNLTVKDVTKE |
| | | | DQGEYSFVIDGKKTTCKLKMKPRPIAILQGLSDQKVC |
| | | | EGDIVQLEVKVSLESVEGVWMKDGQEVQPSDRVHIVI |
| | | | DKQSHMLLIEDMTKEDAGNYSFTIPALGLSTSGRVSV |
| | | | YSVDVITPLKDVNVIEGTKAVLECKVSVPDVTSVKWY |
| | | | LNDEQIKPDDRVQAIVKGTKQRLVINRTHASDEGPYK |
| | | | LIVGRVETNCNLSVEKIKIIRGLRDLTCTETQNVVFE |
| | | | VELSHSGIDVLWNFKDKEIKPSSKYKIEAHGKIYKLT |
| | | | VLNMMKDDEGKYTFYAGENMTSGKLTVAGGAISKPLT |
| | | | DQTVAESQEAVFECEVANPDSKGEWLRDGKHLPLTNN |
| | | | IRSESDGHKRRLIIAATKLDDIGEYTYKVATSKTSAK |
| | | | LKVEAVKIKKTLKNLTVTETQDAVETVELTHPNVKGV |
| | | | QWIKNGVVLESNEKYAISVKGTIYSLRIKNCAIVDES |
| | | | VYGFRLGRLGASARLHVETVKIIKKPKDVTALENATV |
| | | | AFEVSVSHDTVPVKWFHKSVEIKPSDKHRLVSERKVH |
| | | | KLMLQNISPSDAGEYTAVVGQLECKAKLFVETLHITK |
| | | | TMKNIEVPETKTASFECEVSHENVPSMWLKNGVEIEM |
| | | | SEKFKIVVQGKLHQLIIMNTSTEDSAEYTFVCGNDQV |
| | | | SATLTVTPIMITSMLKDINAEEKDTITFEVTVNYEGI |
| | | | SYKWLKNGVEIKSTDKCQMRTKKLTHSLNIRNVHFGD |
| | | | AADYTFVAGKATSTATLYVEARHIEFRKHIKDIKVLE |
| | | | KKRAMFECEVSEPDITVQWMKDDQELQITDRIKIQKE |
| | | | KYVHRLLIPSTRMSDAGKYTVVAGGNVSTAKLEVEGR |
| | | | DVRIRSIKKEVQVIEKQRAVVEFEVNEDDVDAHWYKD |
| | | | GIEINFQVQERHKYVVERRIHRMFISETRQSDAGEYT |
| | | | FVAGRNRSSVTLYVNAPEPPQVLQELQPVTVQSGKPA |
| | | | RFCAVISGRPQPKISWYKEEQLLSTGFKCKELHDGQE |
| | | | YTLLLIEAFPEDAAVYTCEAKNDYGVATTSASLSVEV |
| | | | PEVVSPDQEMPVYPPAIITPLQDTVTSEGQPARFQCR |
| | | | VSGTDLKVSWYSKDKKIKPSRFFRMTQFEDTYQLEIA |
| | | | EAYPEDEGTYTFVASNAVGQVSSTANLSLEAPESILH |
| | | | ERIEQEIEMEMKEFSSSFLSAEEEGLHSAELQLSKIN |
| | | | ETLELLSESPVYPTKEDSEKEGTGPIFIKEVSNADIS |
| | | | MGDVATLSVTVIGIPKPKIQWFFNGVLLTPSADYKFV |
| | | | FDGDDHSLIILFTKLEDEGEYTCMASNDYGKTICSAY |
| | | | LKINSKGEGHKDTETESAVAKSLEKLGGPCPPHELKE |
| | | | LKPIRCAQGLPAIFEYTVVGEPAPTVTWEKENKQLCT |
| | | | SVYYTIIHNPNGSGTFIVNDPQREDSGLYICKAENML |
| | | | GESTCAAELLVLLEDTDMTDTPCKAKSTPEAPEDEPQ |
| | | | TPLKGPAVEALDSEQEIATFVKDTILKAALITEENQQ |
| | | | LSYEHIAKANELSSQLPLGAQELQSILEQDKLTPEST |
| | | | REFLCINGSIHFQPLKEPSPNLQLQIVQSQKTESKEG |
| | | | ILMPEEPETQAVLSDTEKIFPSAMSIEQINSLTVEPL |
| | | | KTLLAEPEGNYPQSSIEPPMHSYLTSVAEEVLSPKEK |
| | | | TVSDTNREQRVTLQKQEAQSALILSQSLAEGHVESLQ |
| | | | SPDVMISQVNYEPLVPSEHSCTEGGKILIESANPLEN |
| | | | AGQDSAVRIEEGKSLRFPLALEEKQVLLKEEHSDNVV |
| | | | MPPDQIIESKREPVAIKKVQEVQGRDLLSKESLLSGI |
| | | | PEEQRLNLKIQICRALQAAVASEQPGLESEWLRNIEK |
| | | | VEVEAVNITQEPRHIMCMYLVTSAKSVTEEVTIIIED |
| | | | VDPQMANLKMELRDALCAIIYEEIDILTAEGPRIQQG |
| | | | AKTSLQEEMDSFSGSQKVEPITEPEVESKYLISTEEV |
| | | | SYFNVQSRVKYLDATPVTKGVASAVVSDEKQDESLKP |
| | | | SEEKEESSSESGTEEVATVKIQEAEGGLIKEDGPMIH |
| | | | TPLVDTVSEEGDIVHLTTSITNAKEVNWYFENKLVPS |
| | | | DEKFKCLQDQNTYTLVIDKVNTEDHQGEYVCEALNDS |
| | | | GKTATSAKLTVVKRAAPVIKRKIEPLEVALGHLAKFT |
| | | | CEIQSAPNVRFQWFKAGREIYESDKCSIRSSKYISSL |
| | | | EILRTQVVDCGEYTCKASNEYGSVSCTATLTVTEAYP |
| | | | PTFLSRPKSLTTFVGKAAKFICTVTGTPVIETIWQKD |
| | | | GAALSPSPNWRISDAENKHILELSNLTIQDRGVYSCK |
| | | | ASNKFGADICQAELIIIDKPHFIKELEPVQSAINKKV |
| | | | HLECQVDEDRKVTVTWSKDGQKLPPGKDYKICFEDKI |
| | | | ATLEIPLAKLKDSGTYVCTASNEAGSSSCSATVTVRE |
| | | | PPSFVKKVDPSYLMLPGESARLHCKLKGSPVIQVTWE |
| | | | KNNKELSESNTVRMYFVNSEAILDITDVKVEDSGSYS |
| | | | CEAVNDVGSDSCSTEIVIKEPPSFIKTLEPADIVRGT |
| | | | NALLQCEVSGTGPFEISWEKDKKQIRSSKKYRLESQK |
| | | | SLVCLEIFSENSADVGEYECVVANEVGKCGCMATHLL |
| | | | KEPPTFVKKVDDLIALGGQTVTLQAAVRGSEPISVTW |
| | | | MKGQEVIREDGKIKMSFSNGVAVLIIPDVQISFGGKY |
| | | | TCLAENEAGSQTSVGELIVKEPAKIIERAELIQVTAG |
| | | | DPATLEYTVAGTPELKPKWYKDGRPLVASKKYRISFK |
| | | | NNVAQLKFYSAELHDSGQYTFEISNEVGSSSCETTFT |
| | | | VLDRDIAPFFTKPLRNVDSVVNGTCRLDCKIAGSLPM |
| | | | RVSWFKDGKEIAASDRYRIAFVEGTASLEIIRVDMND |
| | | | AGNFTCRATNSVGSKDSSGALIVQEPPSFVTKPGSKD |
| | | | VLPGSAVCLKSTFQGSTPLTIRWFKGNKELVSGGSCY |
| | | | ITKEALESSLELYLVKTSDSGTYTCKVSNVAGGVECS |
| | | | ANLFVKEPATFVEKLEPSQLLKKGDATQLACKVTGTP |
| | | | PIKITWFANDREIKESSKHRMSFVESTAVLRLTDVGI |
| | | | EDSGEYMCEAQNEAGSDHCSSIVIVKESPYFTKEFKP |
| | | | IEVLKEYDVMLLAEVAGTPPFEITWFKDNTILRSGRK |
| | | | YKTFIQDHLVSLQILKEVAADAGEYQCRVTNEVGSSI |
| | | | CSARVTLREPPSFIKKIESTSSLRGGTAAFQATLKGS |
| | | | LPITVTWLKDSDEITEDDNIRMTFENNVASLYLSGIE |
| | | | VKHDGKYVCQAKNDAGIQRCSALLSVKEPATITEEAV |
| | | | SIDVTQGDPATLQVKFSGTKEITAKWFKDGQELTLGS |
| | | | KYKISVTDTVSILKIISTEKKDSGEYTFEVQNDVGRS |
| | | | SCKARINVLDLIIPPSFTKKLKKMDSIKGSFIDLECI |
| | | | VAGSHPISIQWEKDDQEISASEKYKFSFHDNTAFLEI |
| | | | SQLEGTDSGTYTCSATNKAGHNQCSGHLTVKEPPYFV |
| | | | EKPQSQDVNPNTRVQLKALVGGTAPMTIKWEKDNKEL |
| | | | HSGAARSVWKDDTSTSLELFAAKATDSGTYICQLSND |
| | | | VGTATSKATLFVKEPPQFIKKPSPVLVLRNGQSTTFE |
| | | | CQITGTPKIRVSWYLDGNEITAIQKHGISFIDGLATF |
| | | | QISGARVENSGTYVCEARNDAGTASCSIELKVKEPPT |
| | | | FIRELKPVEVVKYSDVELECEVTGTPPFEVTWLKNNR |
| | | | EIRSSKKYTLTDRVSVENLHITKCDPSDTGEYQCIVS |
| | | | NEGGSCSCSTRVALKEPPSFIKKIENTTTVLKSSATE |
| | | | QSTVAGSPPISITWLKDDQILDEDDNVYISFVDSVAT |
| | | | LQIRSVDNGHSGRYTCQAKNESGVERCYAFLLVQEPA |
| | | | QIVEKAKSVDVTEKDPMTLECVVAGTPELKVKWLKDG |
| | | | KQIVPSRYFSMSFENNVASFRIQSVMKQDSGQYTFKV |
| | | | ENDFGSSSCDAYLRVLDQNIPPSFTKKLTKMDKVLGS |
| | | | SIHMECKVSGSLPISAQWEKDGKEISTSAKYRLVCHE |
| | | | RSVSLEVNNLELEDTANYTCKVSNVAGDDACSGILTV |
| | | | KEPPSFLVKPGRQQAIPDSTVEFKAILKGTPPFKIKW |
| | | | FKDDVELVSGPKCFIGLEGSTSFLNLYSVDASKTGQY |
| | | | TCHVTNDVGSDSCTTMLLVTEPPKFVKKLEASKIVKA |
| | | | GDSSRLECKIAGSPEIRVVWERNEHELPASDKYRMTF |
| | | | IDSVAVIQMNNLSTEDSGDFICEAQNPAGSTSCSTKV |
| | | | IVKEPPVFSSFPPIVETLKNAEVSLECELSGTPPFEV |
| | | | VWYKDKRQLRSSKKYKIASKNFHTSIHILNVDTSDIG |
| | | | EYHCKAQNEVGSDTCVCTVKLKEPPRFVSKLNSLTVV |
| | | | AGEPAELQASIEGAQPIFVQWLKEKEEVIRESENIRI |
| | | | TFVENVATLQFAKAEPANAGKYICQIKNDGGMRENMA |
| | | | TLMVLEPAVIVEKAGPMTVTVGETCTLECKVAGTPEL |
| | | | SVEWYKDGKLLTSSQKHKFSFYNKISSLRILSVERQD |
| | | | AGTYTFQVQNNVGKSSCTAVVDVSDRAVPPSFTRRLK |
| | | | NTGGVLGASCILECKVAGSSPISVAWFHEKTKIVSGA |
| | | | KYQTTFSDNVCTLQLNSLDSSDMGNYTCVAANVAGSD |
| | | | ECRAVLTVQEPPSFVKEPEPLEVLPGKNVTFTSVIRG |
| | | | TPPFKVNWERGARELVKGDRCNIYFEDTVAELELENI |
| | | | DISQSGEYTCVVSNNAGQASCTTRLFVKEPAAFLKRL |
| | | | SDHSVEPGKSIILESTYTGTLPISVTWKKDGENITTS |
| | | | EKCNIVTTEKTCILEILNSTKRDAGQYSCEIENEAGR |
| | | | DVCGALVSTLEPPYFVTELEPLEAAVGDSVSLQCQVA |
| | | | GTPEITVSWYKGDTKLRPTPEYRTYFINNVATLVENK |
| | | | VNINDSGEYTCKAENSIGTASSKTVFRIQERQLPPSE |
| | | | ARQLKDIEQTVGLPVTLTCRLNGSAPIQVCWYRDGVL |
| | | | LRDDENLQTSFVDNVATLKILQTDLSHSGQYSCSASN |
| | | | PLGTASSSARLTAREPKKSPFFDIKPVSIDVIAGESA |
| | | | DFECHVTGAQPMRITWSKDNKEIRPGGNYTITCVGNT |
| | | | PHLRILKVGKGDSGQYTCQATNDVGKDMCSAQLSVKE |
| | | | PPKFVKKLEASKVAKQGESIQLECKISGSPEIKVSWF |
| | | | RNDSELHESWKYNMSFINSVALLTINEASAEDSGDYI |
| | | | CEAHNGVGDASCSTALTVKAPPVFTQKPSPVGALKGS |
| | | | DVILQCEISGTPPFEVVWVKDRKQVRNSKKFKITSKH |
| | | | FDTSLHILNLEASDVGEYHCKATNEVGSDTCSCSVKF |
| | | | KEPPRFVKKLSDTSTLIGDAVELRAIVEGFQPISVVW |
| | | | LKDRGEVIRESENTRISFIDNIATLQLGSPEASNSGK |
| | | | YICQIKNDAGMRECSAVLTVLEPARIIEKPEPMTVTT |
| | | | GNPFALECVVTGTPELSAKWFKDGRELSADSKHHITF |
| | | | INKVASLKIPCAEMSDKGLYSFEVKNSVGKSNCTVSV |
| | | | HVSDRIVPPSFIRKLKDVNAILGASVVLECRVSGSAP |
| | | | ISVGWFQDGNEIVSGPKCQSSESENVCTLNLSLLEPS |
| | | | DTGIYTCVAANVAGSDECSAVLTVQEPPSFEQTPDSV |
| | | | EVLPGMSLTFTSVIRGTPPFKVKWFKGSRELVPGESC |
| | | | NISLEDFVTELELFEVQPLESGDYSCLVINDAGSASC |
| | | | TTHLFVKEPATFVKRLADESVETGSPIVLEATYTGTP |
| | | | PISVSWIKDEYLISQSERCSITMTEKSTILEILESTI |
| | | | EDYAQYSCLIENEAGQDICEALVSVLEPPYFIEPLEH |
| | | | VEAVIGEPATLQCKVDGTPEIRISWYKEHTKLRSAPA |
| | | | YKMQFKNNVASLVINKVDHSDVGEYSCKADNSVGAVA |
| | | | SSAVLVIKARKLPPFFARKLKDVHETLGFPVAFECRI |
| | | | NGSEPLQVSWYKDGVLLKDDANLQTSFVHNVATLQIL |
| | | | QTDQSHIGQYNCSASNPLGTASSSAKLILSEHEVPPE |
| | | | FDLKPVSVDLALGESGTFKCHVTGTAPIKITWAKDNR |
| | | | EIRPGGNYKMTLVENTATLTVLKVGKGDAGQYTCYAS |
| | | | NIAGKDSCSAQLGVQEPPRFIKKLEPSRIVKQDEFTR |
| | | | YECKIGGSPEIKVLWYKDETEIQESSKERMSFVDSVA |
| | | | VLEMHNLSVEDSGDYTCEAHNAAGSASSSTSLKVKEP |
| | | | PIFRKKPHPIETLKGADVHLECELQGTPPFHVSWYKD |
| | | | KRELRSGKKYKIMSENFLTSIHILNVDAADIGEYQCK |
| | | | ATNDVGSDTCVGSIALKAPPRFVKKLSDISTVVGKEV |
| | | | QLQTTIEGAEPISVVWFKDKGEIVRESDNIWISYSEN |
| | | | IATLQFSRVEPANAGKYTCQIKNDAGMQECFATLSVL |
| | | | EPATIVEKPESIKVTTGDTCTLECTVAGTPELSTKWF |
| | | | KDGKELTSDNKYKISFENKVSGLKIINVAPSDSGVYS |
| | | | FEVQNPVGKDSCTASLQVSDRTVPPSFTRKLKETNGL |
| | | | SGSSVVMECKVYGSPPISVSWFHEGNEISSGRKYQTT |
| | | | LTDNTCALTVNMLEESDSGDYTCIATNMAGSDECSAP |
| | | | LTVREPPSFVQKPDPMDVLTGTNVTFTSIVKGTPPES |
| | | | VSWFKGSSELVPGDRCNVSLEDSVAELELFDVDTSQS |
| | | | GEYTCIVSNEAGKASCTTHLYIKAPAKFVKRLNDYSI |
| | | | EKGKPLILEGTFTGTPPISVTWKKNGINVTPSQRCNI |
| | | | TTTEKSAILEIPSSTVEDAGQYNCYIENASGKDSCSA |
| | | | QILILEPPYFVKQLEPVKVSVGDSASLQCQLAGTPEI |
| | | | GVSWYKGDTKLRPTTTYKMHFRNNVATLVENQVDIND |
| | | | SGEYICKAENSVGEVSASTFLTVQEQKLPPSFSRQLR |
| | | | DVQETVGLPVVEDCAISGSEPISVSWYKDGKPLKDSP |
| | | | NVQTSFLDNTATLNIFKTDRSLAGQYSCTATNPIGSA |
| | | | SSSARLILTEGKNPPFFDIRLAPVDAVVGESADFECH |
| | | | VTGTQPIKVSWAKDSREIRSGGKYQISYLENSAHLTV |
| | | | LKVDKGDSGQYTCYAVNEVGKDSCTAQLNIKERLIPP |
| | | | SFTKRLSETVEETEGNSFKLEGRVAGSQPITVAWYKN |
| | | | NIEIQPTSNCEITFKNNTLVLQVRKAGMNDAGLYTCK |
| | | | VSNDAGSALCTSSIVIKEPKKPPVFDQHLTPVTVSEG |
| | | | EYVQLSCHVQGSEPIRIQWLKAGREIKPSDRCSESFA |
| | | | SGTAVLELRDVAKADSGDYVCKASNVAGSDTTKSKVT |
| | | | IKDKPAVAPATKKAAVDGRLFFVSEPQSIRVVEKTTA |
| | | | TFIAKVGGDPIPNVKWTKGKWRQLNQGGRVFIHQKGD |
| | | | EAKLEIRDTTKTDSGLYRCVAFNEHGEIESNVNLQVD |
| | | | ERKKQEKIEGDLRAMLKKTPILKKGAGEEEEIDIMEL |
| | | | LKNVDPKEYEKYARMYGITDERGLLQAFELLKQSQEE |
| | | | ETHRLEIEEIERSERDEKEFEELVSFIQQRLSQTEPV |
| | | | TLIKDIENQTVLKDNDAVFEIDIKINYPEIKLSWYKG |
| | | | TEKLEPSDKFEISIDGDRHTLRVKNCQLKDQGNYRLV |
| | | | CGPHIASAKLTVIEPAWERHLQDVTLKEGQTCTMTCQ |
| | | | FSVPNVKSEWERNGRILKPQGRHKTEVEHKVHKLTIA |
| | | | DVRAEDQGQYTCKYEDLETSAELRIEAEPIQFTKRIQ |
| | | | NIVVSEHQSATFECEVSEDDAIVTWYKGPTELTESQK |
| | | | YNFRNDGRCHYMTIHNVTPDDEGVYSVIARLEPRGEA |
| | | | RSTAELYLTTKEIKLELKPPDIPDSRVPIPTMPIRAV |
| | | | PPEEIPPVVAPPIPLLLPTPEEKKPPPKRIEVTKKAV |
| | | | KKDAKKVVAKPKEMTPREEIVKKPPPPTTLIPAKAPE |
| | | | IIDVSSKAEEVKIMTITRKKEVQKEKEAVYEKKQAVH |
| | | | KEKRVFIESFEEPYDELEVEPYTEPFEQPYYEEPDED |
| | | | YEEIKVEAKKEVHEEWEEDFEEGQEYYEREEGYDEGE |
| | | | EEWEEAYQEREVIQVQKEVYEESHERKVPAKVPEKKA |
| | | | PPPPKVIKKPVIEKIEKTSRRMEEEKVQVTKVPEVSK |
| | | | KIVPQKPSRTPVQEEVIEVKVPAVHTKKMVISEEKME |
| | | | FASHTEEEVSVTVPEVQKEIVTEEKIHVAISKRVEPP |
| | | | PKVPELPEKPAPEEVAPVPIPKKVEPPAPKVPEVPKK |
| | | | PVPEEKKPVPVPKKEPAAPPKVPEVPKKPVPEEKIPV |
| | | | PVAKKKEAPPAKVPEVQKGVVTEEKITIVTQREESPP |
| | | | PAVPEIPKKKVPEERKPVPRKEEEVPPPPKVPALPKK |
| | | | PVPEEKVAVPVPVAKKAPPPRAEVSKKTVVEEKRFVA |
| | | | EEKLSFAVPQRVEVTRHEVSAEEEWSYSEEEEGVSIS |
| | | | VYREEEREEEEEAEVTEYEVMEEPEEYVVEEKLHIIS |
| | | | KRVEAEPAEVTERQEKKIVLKPKIPAKIEEPPPAKVP |
| | | | EAPKKIVPEKKVPAPVPKKEKVPPPKVPEEPKKPVPE |
| | | | KKVPPKVIKMEEPLPAKVTERHMQITQEEKVLVAVTK |
| | | | KEAPPKARVPEEPKRAVPEEKVLKLKPKREEEPPAKV |
| | | | TEFRKRVVKEEKVSIEAPKREPQPIKEVTIMEEKERA |
| | | | YTLEEEAVSVQREEEYEEYEEYDYKEFEEYEPTEEYD |
| | | | QYEEYEEREYERYEEHEEYITEPEKPIPVKPVPEEPV |
| | | | PTKPKAPPAKVLKKAVPEEKVPVPIPKKLKPPPPKVP |
| | | | EEPKKVFEEKIRISITKREKEQVTEPAAKVPMKPKRV |
| | | | VAEEKVPVPRKEVAPPVRVPEVPKELEPEEVAFEEEV |
| | | | VTHVEEYLVEEEEEYIHEEEEFITEEEVVPVIPVKVP |
| | | | EVPRKPVPEEKKPVPVPKKKEAPPAKVPEVPKKPEEK |
| | | | VPVLIPKKEKPPPAKVPEVPKKPVPEEKVPVPVPKKV |
| | | | EAPPAKVPEVPKKPVPEKKVPVPAPKKVEAPPAKVPE |
| | | | VPKKLIPEEKKPTPVPKKVEAPPPKVPKKREPVPVPV |
| | | | ALPQEEEVLFEEEIVPEEEVLPEEEEVLPEEEEVLPE |
| | | | EEEVLPEEEEIPPEEEEVPPEEEYVPEEEEFVPEEEV |
| | | | LPEVKPKVPVPAPVPEIKKKVTEKKVVIPKKEEAPPA |
| | | | KVPEVPKKVEEKRIILPKEEEVLPVEVTEEPEEEPIS |
| | | | EEEIPEEPPSIEEVEEVAPPRVPEVIKKAVPEAPTPV |
| | | | PKKVEAPPAKVSKKIPEEKVPVPVQKKEAPPAKVPEV |
| | | | PKKVPEKKVLVPKKEAVPPAKGRTVLEEKVSVAFRQE |
| | | | VVVKERLELEVVEAEVEEIPEEEEFHEVEEYFEEGEF |
| | | | HEVEEFIKLEQHRVEEEHRVEKVHRVIEVFEAEEVEV |
| | | | FEKPKAPPKGPEISEKIIPPKKPPTKVVPRKEPPAKV |
| | | | PEVPKKIVVEEKVRVPEEPRVPPTKVPEVLPPKEVVP |
| | | | EKKVPVPPAKKPEAPPPKVPEAPKEVVPEKKVPVPPP |
| | | | KKPEVPPTKVPEVPKAAVPEKKVPEAIPPKPESPPPE |
| | | | VPEAPKEVVPEKKVPAAPPKKPEVTPVKVPEAPKEVV |
| | | | PEKKVPVPPPKKPEVPPTKVPEVPKVAVPEKKVPEAI |
| | | | PPKPESPPPEVFEEPEEVALEEPPAEVVEEPEPAAPP |
| | | | QVTVPPKKPVPEKKAPAVVAKKPELPPVKVPEVPKEV |
| | | | VPEKKVPLVVPKKPEAPPAKVPEVPKEVVPEKKVAVP |
| | | | KKPEVPPAKVPEVPKKPVLEEKPAVPVPERAESPPPE |
| | | | VYEEPEEIAPEEEIAPEEEKPVPVAEEEEPEVPPPAV |
| | | | PEEPKKIIPEKKVPVIKKPEAPPPKEPEPEKVIEKPK |
| | | | LKPRPPPPPPAPPKEDVKEKIFQLKAIPKKKVPEKPQ |
| | | | VPEKVELTPLKVPGGEKKVRKLLPERKPEPKEEVVLK |
| | | | SVLRKRPEEEEPKVEPKKLEKVKKPAVPEPPPPKPVE |
| | | | EVEVPTVTKRERKIPEPTKVPEIKPAIPLPAPEPKPK |
| | | | PEAEVKTIKPPPVEPEPTPIAAPVTVPVVGKKAEAKA |
| | | | PKEEAAKPKGPIKGVPKKTPSPIEAERRKLRPGSGGE |
| | | | KPPDEAPFTYQLKAVPLKFVKEIKDIILTESEFVGSS |
| | | | AIFECLVSPSTAITTWMKDGSNIRESPKHRFIADGKD |
| | | | RKLHIIDVQLSDAGEYTCVLRLGNKEKTSTAKLVVEE |
| | | | LPVRFVKTLEEEVTVVKGQPLYLSCELNKERDVVWRK |
| | | | DGKIVVEKPGRIVPGVIGLMRALTINDADDTDAGTYT |
| | | | VTVENANNLECSSCVKVVEVIRDWLVKPIRDQHVKPK |
| | | | GTAIFACDIAKDTPNIKWEKGYDEIPAEPNDKTEILR |
| | | | DGNHLYLKIKNAMPEDIAEYAVEIEGKRYPAKLTLGE |
| | | | REVELLKPIEDVTIYEKESASFDAEISEADIPGQWKL |
| | | | KGELLRPSPTCEIKAEGGKRFLTLHKVKLDQAGEVLY |
| | | | QALNAITTAILTVKEIELDFAVPLKDVTVPERRQARE |
| | | | ECVLTREANVIWSKGPDIIKSSDKFDIIADGKKHILV |
| | | | INDSQFDDEGVYTAEVEGKKTSARLFVTGIRLKFMSP |
| | | | LEDQTVKEGETATFVCELSHEKMHVVWFKNDAKLHTS |
| | | | RTVLISSEGKTHKLEMKEVTLDDISQIKAQVKELSST |
| | | | AQLKVLEADPYFTVKLHDKTAVEKDEITLKCEVSKDV |
| | | | PVKWFKDGEEIVPSPKYSIKADGLRRILKIKKADLKD |
| | | | KGEYVCDCGTDKTKANVTVEARLIKVEKPLYGVEVFV |
| | | | GETAHFEIELSEPDVHGQWKLKGQPLTASPDCEIIED |
| | | | GKKHILILHNCQLGMTGEVSFQAANAKSAANLKVKEL |
| | | | PLIFITPLSDVKVFEKDEAKFECEVSREPKTFRWLKG |
| | | | TQEITGDDRFELIKDGTKHSMVIKSAAFEDEAKYMFE |
| | | | AEDKHTSGKLIIEGIRLKELTPLKDVTAKEKESAVET |
| | | | VELSHDNIRVKWFKNDQRLHTTRSVSMQDEGKTHSIT |
| | | | FKDLSIDDTSQIRVEAMGMSSEAKLTVLEGDPYFTGK |
| | | | LQDYTGVEKDEVILQCEISKADAPVKWFKDGKEIKPS |
| | | | KNAVIKADGKKRMLILKKALKSDIGQYTCDCGTDKTS |
| | | | GKLDIEDREIKLVRPLHSVEVMETETARFETEISEDD |
| | | | IHANWKLKGEALLQTPDCEIKEEGKIHSLVLHNCRLD |
| | | | QTGGVDFQAANVKSSAHLRVKPRVIGLLRPLKDVTVT |
| | | | AGETATFDCELSYEDIPVEWYLKGKKLEPSDKVVPRS |
| | | | EGKVHTLTLRDVKLEDAGEVQLTAKDEKTHANLFVKE |
| | | | PPVEFTKPLEDQTVEEGATAVLECEVSRENAKVKWEK |
| | | | NGTEILKSKKYEIVADGRVRKLVIHDCTPEDIKTYTC |
| | | | DAKDFKTSCNLNVVPPHVEFLRPLTDLQVREKEMARE |
| | | | ECELSRENAKVKWFKDGAEIKKGKKYDIISKGAVRIL |
| | | | VINKCLLDDEAEYSCEVRTARTSGMLTVLEEEAVFTK |
| | | | NLANIEVSETDTIKLVCEVSKPGAEVIWYKGDEEIIE |
| | | | TGRYEILTEGRKRILVIQNAHLEDAGNYNCRLPSSRT |
| | | | DGKVKVHELAAEFISKPQNLEILEGEKAEFVCSISKE |
| | | | SFPVQWKRDDKTLESGDKYDVIADGKKRVLVVKDATL |
| | | | QDMGTYVVMVGAARAAAHLTVIEKLRIVVPLKDTRVK |
| | | | EQQEVVENCEVNTEGAKAKWERNEEAIFDSSKYIILQ |
| | | | KDLVYTLRIRDAHLDDQANYNVSLTNHRGENVKSAAN |
| | | | LIVEEEDLRIVEPLKDIETMEKKSVTFWCKVNRLNVT |
| | | | LKWTKNGEEVPFDNRVSYRVDKYKHMLTIKDCGFPDE |
| | | | GEYIVTAGQDKSVAELLIIEAPTEFVEHLEDQTVTEF |
| | | | DDAVFSCQLSREKANVKWYRNGREIKEGKKYKFEKDG |
| | | | SIHRLIIKDCRLDDECEYACGVEDRKSRARLFVEEIP |
| | | | VEIIRPPQDILEAPGADVVELAELNKDKVEVQWLRNN |
| | | | MVVVQGDKHQMMSEGKIHRLQICDIKPRDQGEYRFIA |
| | | | KDKEARAKLELAAAPKIKTADQDLVVDVGKPLTMVVP |
| | | | YDAYPKAEAEWEKENEPLSTKTIDTTAEQTSFRILEA |
| | | | KKGDKGRYKIVLQNKHGKAEGFINLKVIDVPGPVRNL |
| | | | EVTETFDGEVSLAWEEPLTDGGSKIIGYVVERRDIKR |
| | | | KTWVLATDRAESCEFTVTGLQKGGVEYLFRVSARNRV |
| | | | GTGEPVETDNPVEARSKYDVPGPPLNVTITDVNRFGV |
| | | | SLTWEPPEYDGGAEITNYVIELRDKTSIRWDTAMTVR |
| | | | AEDLSATVTDVVEGQEYSFRVRAQNRIGVGKPSAATP |
| | | | FVKVADPIERPSPPVNLTSSDQTQSSVQLKWEPPLKD |
| | | | GGSPILGYIIERCEEGKDNWIRCNMKLVPELTYKVTG |
| | | | LEKGNKYLYRVSAENKAGVSDPSEILGPLTADDAFVE |
| | | | PTMDLSAFKDGLEVIVPNPITILVPSTGYPRPTATWC |
| | | | FGDKVLETGDRVKMKTLSAYAELVISPSERSDKGIYT |
| | | | LKLENRVKTISGEIDVNVIARPSAPKELKFGDITKDS |
| | | | VHLTWEPPDDDGGSPLTGYVVEKREVSRKTWTKVMDE |
| | | | VTDLEFTVPDLVQGKEYLFKVCARNKCGPGEPAYVDE |
| | | | PVNMSTPATVPDPPENVKWRDRTANSIFLTWDPPKND |
| | | | GGSRIKGYIVERCPRGSDKWVACGEPVAETKMEVTGL |
| | | | EEGKWYAYRVKALNRQGASKPSRPTEEIQAVDTQEAP |
| | | | EIFLDVKLLAGLTVKAGTKIELPATVTGKPEPKITWT |
| | | | KADMILKQDKRITIENVPKKSTVTIVDSKRSDTGTYI |
| | | | IEAVNVCGRATAVVEVNVLDKPGPPAAFDITDVTNES |
| | | | CLLTWNPPRDDGGSKITNYVVERRATDSEVWHKLSST |
| | | | VKDTNFKATKLIPNKEYIFRVAAENMYGVGEPVQASP |
| | | | ITAKYQFDPPGPPTRLEPSDITKDAVTLTWCEPDDDG |
| | | | GSPITGYWVERLDPDTDKWVRCNKMPVKDTTYRVKGL |
| | | | TNKKKYRFRVLAENLAGPGKPSKSTEPILIKDPIDPP |
| | | | WPPGKPTVKDVGKTSVRLNWTKPEHDGGAKIESYVIE |
| | | | MLKTGTDEWVRVAEGVPTTQHLLPGLMEGQEYSERVR |
| | | | AVNKAGESEPSEPSDPVLCREKLYPPSPPRWLEVINI |
| | | | TKNTADLKWTVPEKDGGSPITNYIVEKRDVRRKGWQT |
| | | | VDTTVKDTKCTVTPLTEGSLYVERVAAENAIGQSDYT |
| | | | EIEDSVLAKDTFTTPGPPYALAVVDVTKRHVDLKWEP |
| | | | PKNDGGRPIQRYVIEKKERLGTRWVKAGKTAGPDCNF |
| | | | RVTDVIEGTEVQFQVRAENEAGVGHPSEPTEILSIED |
| | | | PTSPPSPPLDLHVTDAGRKHIAIAWKPPEKNGGSPII |
| | | | GYHVEMCPVGTEKWMRVNSRPIKDLKFKVEEGVVPDK |
| | | | EYVLRVRAVNAIGVSEPSEISENVVAKDPDCKPTIDL |
| | | | ETHDIIVIEGEKLSIPVPFRAVPVPTVSWHKDGKEVK |
| | | | ASDRLTMKNDHISAHLEVPKSVRADAGIYTITLENKL |
| | | | GSATASINVKVIGLPGPCKDIKASDITKSSCKLTWEP |
| | | | PEFDGGTPILHYVLERREAGRRTYIPVMSGENKLSWT |
| | | | VKDLIPNGEYFFRVKAVNKVGGGEYIELKNPVIAQDP |
| | | | KQPPDPPVDVEVHNPTAEAMTITWKPPLYDGGSKIMG |
| | | | YIIEKIAKGEERWKRCNEHLVPILTYTAKGLEEGKEY |
| | | | QFRVRAENAAGISEPSRATPPTKAVDPIDAPKVILRT |
| | | | SLEVKRGDEIALDASISGSPYPTITWIKDENVIVPEE |
| | | | IKKRAAPLVRRRKGEVQEEEPFVLPLTQRLSIDNSKK |
| | | | GESQLRVRDSLRPDHGLYMIKVENDHGIAKAPCTVSV |
| | | | LDTPGPPINFVFEDIRKTSVLCKWEPPLDDGGSEIIN |
| | | | YTLEKKDKTKPDSEWIVVTSTLRHCKYSVTKLIEGKE |
| | | | YLERVRAENRFGPGPPCVSKPLVAKDPFGPPDAPDKP |
| | | | IVEDVTSNSMLVKWNEPKDNGSPILGYWLEKREVNST |
| | | | HWSRVNKSLLNALKANVDGLLEGLTYVERVCAENAAG |
| | | | PGKFSPPSDPKTAHDPISPPGPPIPRVTDTSSTTIEL |
| | | | EWEPPAFNGGGEIVGYFVDKQLVGTNEWSRCTEKMIK |
| | | | VRQYTVKEIREGADYKLRVSAVNAAGEGPPGETQPVT |
| | | | VAEPQEPPAVELDVSVKGGIQIMAGKTLRIPAVVTGR |
| | | | PVPTKVWTKEEGELDKDRVVIDNVGTKSELIIKDALR |
| | | | KDHGRYVITATNSCGSKFAAARVEVFDVPGPVLDLKP |
| | | | VVTNRKMCLLNWSDPEDDGGSEITGFIIERKDAKMHT |
| | | | WRQPIETERSKCDITGLLEGQEYKERVIAKNKFGCGP |
| | | | PVEIGPILAVDPLGPPTSPERLTYTERTKSTITLDWK |
| | | | EPRSNGGSPIQGYIIEKRRHDKPDFERVNKRLCPTTS |
| | | | FLVENLDEHQMYEFRVKAVNEIGESEPSLPLNVVIQD |
| | | | DEVPPTIKLRLSVRGDTIKVKAGEPVHIPADVTGLPM |
| | | | PKIEWSKNETVIEKPTDALQITKEEVSRSEAKTELSI |
| | | | PKAVREDKGTYTVTASNRLGSVERNVHVEVYDRPSPP |
| | | | RNLAVTDIKAESCYLTWDAPLDNGGSEITHYVIDKRD |
| | | | ASRKKAEWEEVTNTAVEKRYGIWKLIPNGQYEFRVRA |
| | | | VNKYGISDECKSDKVVIQDPYRLPGPPGKPKVLARTK |
| | | | GSMLVSWTPPLDNGGSPITGYWLEKREEGSPYWSRVS |
| | | | RAPITKVGLKGVEFNVPRLLEGVKYQFRAMAINAAGI |
| | | | GPPSEPSDPEVAGDPIFPPGPPSCPEVKDKTKSSISL |
| | | | GWKPPAKDGGSPIKGYIVEMQEEGTTDWKRVNEPDKL |
| | | | ITTCECVVPNLKELRKYRFRVKAVNEAGESEPSDTTG |
| | | | EIPATDIQEEPEVFIDIGAQDCLVCKAGSQIRIPAVI |
| | | | KGRPTPKSSWEFDGKAKKAMKDGVHDIPEDAQLETAE |
| | | | NSSVIIIPECKRSHTGKYSITAKNKAGQKTANCRVKV |
| | | | MDVPGPPKDLKVSDITRGSCRLSWKMPDDDGGDRIKG |
| | | | YVIEKRTIDGKAWTKVNPDCGSTTFVVPDLLSEQQYF |
| | | | FRVRAENREGIGPPVETIQRTTARDPIYPPDPPIKLK |
| | | | IGLITKNTVHLSWKPPKNDGGSPVTHYIVECLAWDPT |
| | | | GTKKEAWRQCNKRDVEELQFTVEDLVEGGEYEFRVKA |
| | | | VNAAGVSKPSATVGPVTVKDQTCPPSIDLKEFMEVEE |
| | | | GTNVNIVAKIKGVPFPTLTWFKAPPKKPDNKEPVLYD |
| | | | THVNKLVVDDTCTLVIPQSRRSDTGLYTITAVNNLGT |
| | | | ASKEMRLNVLGRPGPPVGPIKFESVSADQMTLSWFPP |
| | | | KDDGGSKITNYVIEKREANRKTWVHVSSEPKECTYTI |
| | | | PKLLEGHEYVERIMAQNKYGIGEPLDSEPETARNLES |
| | | | VPGAPDKPTVSSVTRNSMTVNWEEPEYDGGSPVTGYW |
| | | | LEMKDTTSKRWKRVNRDPIKAMTLGVSYKVTGLIEGS |
| | | | DYQFRVYAINAAGVGPASLPSDPATARDPIAPPGPPF |
| | | | PKVTDWTKSSADLEWSPPLKDGGSKVTGYIVEYKEEG |
| | | | KEEWEKGKDKEVRGTKLVVTGLKEGAFYKERVRAVNI |
| | | | AGIGEPGEVTDVIEMKDRLVSPDLQLDASVRDRIVVH |
| | | | AGGVIRIIAYVSGKPPPTVTWNMNERTLPQEATIETT |
| | | | AISSSMVIKNCQRSHQGVYSLLAKNEAGERKKTIIVD |
| | | | VLDVPGPVGTPFLAHNLTNESCKLTWFSPEDDGGSPI |
| | | | TNYVIEKRESDRRAWTPVTYTVTRQNATVQGLIQGKA |
| | | | YFFRIAAENSIGMGPFVETSEALVIREPITVPERPED |
| | | | LEVKEVTKNTVTLTWNPPKYDGGSEIINYVLESRLIG |
| | | | TEKFHKVTNDNLLSRKYTVKGLKEGDTYEYRVSAVNI |
| | | | VGQGKPSFCTKPITCKDELAPPTLHLDERDKLTIRVG |
| | | | EAFALTGRYSGKPKPKVSWFKDEADVLEDDRTHIKTT |
| | | | PATLALEKIKAKRSDSGKYCVVVENSTGSRKGFCQVN |
| | | | VVDRPGPPVGPVSFDEVTKDYMVISWKPPLDDGGSKI |
| | | | TNYIIEKKEVGKDVWMPVTSASAKTTCKVSKLLEGKD |
| | | | YIFRIHAENLYGISDPLVSDSMKAKDRERVPDAPDQP |
| | | | IVTEVTKDSALVTWNKPHDGGKPITNYILEKRETMSK |
| | | | RWARVTKDPIHPYTKERVPDLLEGCQYEFRVSAENEI |
| | | | GIGDPSPPSKPVFAKDPIAKPSPPVNPEAIDTTCNSV |
| | | | DLTWQPPRHDGGSKILGYIVEYQKVGDEEWRRANHTP |
| | | | ESCPETKYKVTGLRDGQTYKERVLAVNAAGESDPAHV |
| | | | PEPVLVKDRLEPPELILDANMAREQHIKVGDTLRLSA |
| | | | IIKGVPFPKVTWKKEDRDAPTKARIDVTPVGSKLEIR |
| | | | NAAHEDGGIYSLTVENPAGSKTVSVKVLVLDKPGPPR |
| | | | DLEVSEIRKDSCYLTWKEPLDDGGSVITNYVVERRDV |
| | | | ASAQWSPLSATSKKKSHFAKHLNEGNQYLERVAAENQ |
| | | | YGRGPFVETPKPIKALDPLHPPGPPKDLHHVDVDKTE |
| | | | VSLVWNKPDRDGGSPITGYLVEYQEEGTQDWIKFKTV |
| | | | TNLECVVTGLQQGKTYRFRVKAENIVGLGLPDTTIPI |
| | | | ECQEKLVPPSVELDVKLIEGLVVKAGTTVRFPAIIRG |
| | | | VPVPTAKWTTDGSEIKTDEHYTVETDNESSVLTIKNC |
| | | | LRRDTGEYQITVSNAAGSKTVAVHLTVLDVPGPPTGP |
| | | | INILDVTPEHMTISWQPPKDDGGSPVINYIVEKQDTR |
| | | | KDTWGVVSSGSSKTKLKIPHLQKGCEYVERVRAENKI |
| | | | GVGPPLDSTPTVAKHKFSPPSPPGKPVVTDITENAAT |
| | | | VSWTLPKSDGGSPITGYYMERREVTGKWVRVNKTPIA |
| | | | DLKFRVTGLYEGNTYEFRVFAENLAGLSKPSPSSD |
| | | | PIKACRPIKPPGPPINPKLKDKSRETADLVWTKPLSD |
| | | | GGSPILGYVVECQKPGTAQWNRINKDELIRQCAFRVP |
| | | | GLIEGNEYRFRIKAANIVGEGEPRELAESVIAKDILH |
| | | | PPEVELDVTCRDVITVRVGQTIRILARVKGRPEPDIT |
| | | | WTKEGKVLVREKRVDLIQDLPRVELQIKEAVRADHGK |
| | | | YIISAKNSSGHAQGSAIVNVLDRPGPCQNLKVTNVTK |
| | | | ENCTISWENPLDNGGSEITNFIVEYRKPNQKGWSIVA |
| | | | SDVTKRLIKANLLANNEYYFRVCAENKVGVGPTIETK |
| | | | TPILAINPIDRPGEPENLHIADKGKTFVYLKWRRPDY |
| | | | DGGSPNLSYHVERRLKGSDDWERVHKGSIKETHYMVD |
| | | | RCVENQIYEFRVQTKNEGGESDWVKTEEVVVKEDLQK |
| | | | PVLDLKLSGVLTVKAGDTIRLEAGVRGKPFPEVAWTK |
| | | | DKDATDLTRSPRVKIDTRADSSKESLTKAKRSDGGKY |
| | | | VVTATNTAGSFVAYATVNVLDKPGPVRNLKIVDVSSD |
| | | | RCTVCWDPPEDDGGCEIQNYILEKCETKRMVWSTYSA |
| | | | TVLTPGTTVTRLIEGNEYIFRVRAENKIGTGPPTESK |
| | | | PVIAKTKYDKPGRPDPPEVTKVSKEEMTVVWNPPEYD |
| | | | GGKSITGYFLEKKEKHSTRWVPVNKSAIPERRMKVQN |
| | | | LLPDHEYQFRVKAENEIGIGEPSLPSRPVVAKDPIEP |
| | | | PGPPTNFRVVDTTKHSITLGWGKPVYDGGAPIIGYVV |
| | | | EMRPKIADASPDEGWKRCNAAAQLVRKEFTVTSLDEN |
| | | | QEYEFRVCAQNQVGIGRPAELKEAIKPKEILEPPEID |
| | | | LDASMRKLVIVRAGCPIRLFAIVRGRPAPKVTWRKVG |
| | | | IDNVVRKGQVDLVDTMAFLVIPNSTRDDSGKYSLTLV |
| | | | NPAGEKAVFVNVRVLDTPGPVSDLKVSDVTKTSCHVS |
| | | | WAPPENDGGSQVTHYIVEKREADRKTWSTVTPEVKKT |
| | | | SFHVTNLVPGNEYYFRVTAVNEYGPGVPTDVPKPVLA |
| | | | SDPLSEPDPPRKLEVTEMTKNSATLAWLPPLRDGGAK |
| | | | IDGYITSYREEEQPADRWTEYSVVKDLSLVVTGLKEG |
| | | | KKYKFRVAARNAVGVSLPREAEGVYEAKEQLLPPKIL |
| | | | MPEQITIKAGKKLRIEAHVYGKPHPTCKWKKGEDEVV |
| | | | TSSHLAVHKADSSSILIIKDVTRKDSGYYSLTAENSS |
| | | | GTDTQKIKVVVMDAPGPPQPPEDISDIDADACSLSWH |
| | | | IPLEDGGSNITNYIVEKCDVSRGDWVTALASVTKTSC |
| | | | RVGKLIPGQEYIFRVRAENREGISEPLTSPKMVAQFP |
| | | | FGVPSEPKNARVTKVNKDCIFVAWDRPDSDGGSPIIG |
| | | | YLIERKERNSLLWVKANDTLVRSTEYPCAGLVEGLEY |
| | | | SFRIYALNKAGSSPPSKPTEYVTARMPVDPPGKPEVI |
| | | | DVTKSTVSLIWARPKHDGGSKIIGYFVEACKLPGDKW |
| | | | VRCNTAPHQIPQEEYTATGLEEKAQYQFRAIARTAVN |
| | | | ISPPSEPSDPVTILAENVPPRIDLSVAMKSLLTVKAG |
| | | | TNVCLDATVFGKPMPTVSWKKDGTLLKPAEGIKMAMQ |
| | | | RNLCTLELFSVNRKDSGDYTITAENSSGSKSATIKLK |
| | | | VLDKPGPPASVKINKMYSDRAMLSWEPPLEDGGSEIT |
| | | | NYIVDKRETSRPNWAQVSATVPITSCSVEKLIEGHEY |
| | | | QFRICAENKYGVGDPVFTEPAIAKNPYDPPGRCDPPV |
| | | | ISNITKDHMTVSWKPPADDGGSPITGYLLEKRETQAV |
| | | | NWTKVNRKPIIERTLKATGLQEGTEYEFRVTAINKAG |
| | | | PGKPSDASKAAYARDPQYPPGPPAFPKVYDTTRSSVS |
| | | | LSWGKPAYDGGSPIIGYLVEVKRADSDNWVRCNLPQN |
| | | | LQKTRFEVTGLMEDTQYQFRVYAVNKIGYSDPSDVPD |
| | | | KHYPKDILIPPEGELDADLRKTLILRAGVTMRLYVPV |
| | | | KGRPPPKITWSKPNVNLRDRIGLDIKSTDEDTFLRCE |
| | | | NVNKYDAGKYILTLENSCGKKEYTIVVKVLDTPGPPV |
| | | | NVTVKEISKDSAYVTWEPPIIDGGSPIINYVVQKRDA |
| | | | ERKSWSTVTTECSKTSERVANLEEGKSYFFRVFAENE |
| | | | YGIGDPGETRDAVKASQTPGPVVDLKVRSVSKSSCSI |
| | | | GWKKPHSDGGSRIIGYVVDELTEENKWQRVMKSLSLQ |
| | | | YSAKDLTEGKEYTFRVSAENENGEGTPSEITVVARDD |
| | | | VVAPDLDLKGLPDLCYLAKENSNFRLKIPIKGKPAPS |
| | | | VSWKKGEDPLATDTRVSVESSAVNTTLIVYDCQKSDA |
| | | | GKYTITLKNVAGTKEGTISIKVVGKPGIPTGPIKEDE |
| | | | VTAEAMTLKWAPPKDDGGSEITNYILEKRDSVNNKWV |
| | | | TCASAVQKTTERVTRLHEGMEYTERVSAENKYGVGEG |
| | | | LKSEPIVARHPFDVPDAPPPPNIVDVRHDSVSLTWTD |
| | | | PKKTGGSPITGYHLEFKERNSLLWKRANKTPIRMRDF |
| | | | KVTGLTEGLEYEFRVMAINLAGVGKPSLPSEPVVALD |
| | | | PIDPPGKPEVINITRNSVTLIWTEPKYDGGHKLTGYI |
| | | | VEKRDLPSKSWMKANHVNVPECAFTVTDLVEGGKYEF |
| | | | RIRAKNTAGAISAPSESTETIICKDEYEAPTIVLDPT |
| | | | IKDGLTIKAGDTIVLNAISILGKPLPKSSWSKAGKDI |
| | | | RPSDITQITSTPTSSMLTIKYATRKDAGEYTITATNP |
| | | | FGTKVEHVKVTVLDVPGPPGPVEISNVSAEKATLTWT |
| | | | PPLEDGGSPIKSYILEKRETSRLLWTVVSEDIQSCRH |
| | | | VATKLIQGNEYIFRVSAVNHYGKGEPVQSEPVKMVDR |
| | | | FGPPGPPEKPEVSNVTKNTATVSWKRPVDDGGSEITG |
| | | | YHVERREKKSLRWVRAIKTPVSDLRCKVTGLQEGSTY |
| | | | EFRVSAENRAGIGPPSEASDSVLMKDAAYPPGPPSNP |
| | | | HVTDTTKKSASLAWGKPHYDGGLEITGYVVEHQKVGD |
| | | | EAWIKDTTGTALRITQFVVPDLQTKEKYNFRISAIND |
| | | | AGVGEPAVIPDVEIVEREMAPDFELDAELRRTLVVRA |
| | | | GLSIRIFVPIKGRPAPEVTWTKDNINLKNRANIENTE |
| | | | SFTLLIIPECNRYDTGKFVMTIENPAGKKSGFVNVRV |
| | | | LDTPGPVLNLRPTDITKDSVTLHWDLPLIDGGSRITN |
| | | | YIVEKREATRKSYSTATTKCHKCTYKVTGLSEGCEYE |
| | | | FRVMAENEYGIGEPTETTEPVKASEAPSPPDSLNIMD |
| | | | ITKSTVSLAWPKPKHDGGSKITGYVIEAQRKGSDQWT |
| | | | HITTVKGLECVVRNLTEGEEYTFQVMAVNSAGRSAPR |
| | | | ESRPVIVKEQTMLPELDLRGIYQKLVIAKAGDNIKVE |
| | | | IPVLGRPKPTVTWKKGDQILKQTQRVNFETTATSTIL |
| | | | NINECVRSDSGPYPLTARNIVGEVGDVITIQVHDIPG |
| | | | PPTGPIKFDEVSSDFVTFSWDPPENDGGVPISNYVVE |
| | | | MRQTDSTTWVELATTVIRTTYKATRLTTGLEYQFRVK |
| | | | AQNRYGVGPGITSACIVANYPFKVPGPPGTPQVTAVT |
| | | | KDSMTISWHEPLSDGGSPILGYHVERKERNGILWQTV |
| | | | SKALVPGNIFKSSGLTDGIAYEFRVIAENMAGKSKPS |
| | | | KPSEPMLALDPIDPPGKPVPLNITRHTVTLKWAKPEY |
| | | | TGGFKITSYIVEKRDLPNGRWLKANFSNILENEFTVS |
| | | | GLTEDAAYEFRVIAKNAAGAISPPSEPSDAITCRDDV |
| | | | EAPKIKVDVKFKDTVILKAGEAFRLEADVSGRPPPTM |
| | | | EWSKDGKELEGTAKLEIKIADESTNLVNKDSTRRDSG |
| | | | AYTLTATNPGGFAKHIFNVKVLDRPGPPEGPLAVTEV |
| | | | TSEKCVLSWFPPLDDGGAKIDHYIVQKRETSRLAWTN |
| | | | VASEVQVTKLKVTKLLKGNEYIFRVMAVNKYGVGEPL |
| | | | ESEPVLAVNPYGPPDPPKNPEVTTITKDSMVVCWGHP |
| | | | DSDGGSEIINYIVERRDKAGQRWIKCNKKTLTDLRYK |
| | | | VSGLTEGHEYEFRIMAENAAGISAPSPTSPFYKACDT |
| | | | VFKPGPPGNPRVLDTSRSSISIAWNKPIYDGGSEITG |
| | | | YMVEIALPEEDEWQIVTPPAGLKATSYTITGLTENQE |
| | | | YKIRIYAMNSEGLGEPALVPGTPKAEDRMLPPEIELD |
| | | | ADLRKVVTIRACCTLRLFVPIKGRPAPEVKWARDHGE |
| | | | SLDKASIESTSSYTLLIVGNVNRFDSGKYILTVENSS |
| | | | GSKSAFVNVRVLDTPGPPQDLKVKEVTKTSVTLTWDP |
| | | | PLLDGGSKIKNYIVEKRESTRKAYSTVATNCHKTSWK |
| | | | VDQLQEGCSYYFRVLAENEYGIGLPAETAESVKASER |
| | | | PLPPGKITLMDVTRNSVSLSWEKPEHDGGSRILGYIV |
| | | | EMQTKGSDKWATCATVKVTEATITGLIQGEEYSFRVS |
| | | | AQNEKGISDPRQLSVPVIAKDLVIPPAFKLLENTFTV |
| | | | LAGEDLKVDVPFIGRPTPAVTWHKDNVPLKQTTRVNA |
| | | | ESTENNSLLTIKDACREDVGHYVVKLTNSAGEAIETL |
| | | | NVIVLDKPGPPTGPVKMDEVTADSITLSWGPPKYDGG |
| | | | SSINNYIVEKRDTSTTTWQIVSATVARTTIKACRLKT |
| | | | GCEYQFRIAAENRYGKSTYLNSEPTVAQYPFKVPGPP |
| | | | GTPVVTLSSRDSMEVQWNEPISDGGSRVIGYHLERKE |
| | | | RNSILWVKLNKTPIPQTKFKTTGLEEGVEYEFRVSAE |
| | | | NIVGIGKPSKVSECYVARDPCDPPGRPEAIIVTRNSV |
| | | | TLQWKKPTYDGGSKITGYIVEKKELPEGRWMKASFTN |
| | | | IIDTHFEVTGLVEDHRYEFRVIARNAAGVESEPSEST |
| | | | GAITARDEVDPPRISMDPKYKDTIVVHAGESFKVDAD |
| | | | IYGKPIPTIQWIKGDQELSNTARLEIKSTDFATSLSV |
| | | | KDAVRVDSGNYILKAKNVAGERSVTVNVKVLDRPGPP |
| | | | EGPVVISGVTAEKCTLAWKPPLQDGGSDIINYIVERR |
| | | | ETSRLVWTVVDANVQTLSCKVTKLLEGNEYTFRIMAV |
| | | | NKYGVGEPLESEPVVAKNPFVVPDAPKAPEVTTVTKD |
| | | | SMIVVWERPASDGGSEILGYVLEKRDKEGIRWTRCHK |
| | | | RLIGELRLRVTGLIENHDYEFRVSAENAAGLSEPSPP |
| | | | SAYQKACDPIYKPGPPNNPKVIDITRSSVELSWSKPI |
| | | | YDGGCEIQGYIVEKCDVSVGEWTMCTPPTGINKTNIE |
| | | | VEKLLEKHEYNFRICAINKAGVGEHADVPGPIIVEEK |
| | | | LEAPDIDLDLELRKIINIRAGGSLRLFVPIKGRPTPE |
| | | | VKWGKVDGEIRDAAIIDVTSSFTSLVLDNVNRYDSGK |
| | | | YTLTLENSSGTKSAFVTVRVLDTPSPPVNLKVTEITK |
| | | | DSVSITWEPPLLDGGSKIKNYIVEKREATRKSYAAVV |
| | | | TNCHKNSWKIDQLQEGCSYYFRVTAENEYGIGLPAQT |
| | | | ADPIKVAEVPQPPGKITVDDVTRNSVSLSWTKPEHDG |
| | | | GSKIIQYIVEMQAKHSEKWSECARVKSLQAVITNLTQ |
| | | | GEEYLERVVAVNEKGRSDPRSLAVPIVAKDLVIEPDV |
| | | | KPAFSSYSVQVGQDLKIEVPISGRPKPTITWTKDGLP |
| | | | LKQTTRINVTDSLDLTTLSIKETHKDDGGQYGITVAN |
| | | | VVGQKTASIEIVTLDKPDPPKGPVKEDDVSAESITLS |
| | | | WNPPLYTGGCQITNYIVQKRDTTTTVWDVVSATVART |
| | | | TLKVTKLKTGTEYQFRIFAENRYGQSFALESDPIVAQ |
| | | | YPYKEPGPPGTPFATAISKDSMVIQWHEPVNNGGSPV |
| | | | IGYHLERKERNSILWTKVNKTIIHDTQFKAQNLEEGI |
| | | | EYEFRVYAENIVGVGKASKNSECYVARDPCDPPGTPE |
| | | | PIMVKRNEITLQWTKPVYDGGSMITGYIVEKRDLPDG |
| | | | RWMKASFTNVIETQFTVSGLTEDQRYEFRVIAKNAAG |
| | | | AISKPSDSTGPITAKDEVELPRISMDPKERDTIVVNA |
| | | | GETFRLEADVHGKPLPTIEWLRGDKEIEESARCEIKN |
| | | | TDFKALLIVKDAIRIDGGQYILRASNVAGSKSFPVNV |
| | | | KVLDRPGPPEGPVQVTGVTSEKCSLTWSPPLQDGGSD |
| | | | ISHYVVEKRETSRLAWTVVASEVVTNSLKVTKLLEGN |
| | | | EYVERIMAVNKYGVGEPLESAPVLMKNPFVLPGPPKS |
| | | | LEVTNIAKDSMTVCWNRPDSDGGSEIIGYIVEKRDRS |
| | | | GIRWIKCNKRRITDLRLRVTGLTEDHEYEFRVSAENA |
| | | | AGVGEPSPATVYYKACDPVFKPGPPTNAHIVDTTKNS |
| | | | ITLAWGKPIYDGGSEILGYVVEICKADEEEWQIVTPQ |
| | | | TGLRVTRFEISKLTEHQEYKIRVCALNKVGLGEATSV |
| | | | PGTVKPEDKLEAPELDLDSELRKGIVVRAGGSARIHI |
| | | | PFKGRPTPEITWSREEGEFTDKVQIEKGVNYTQLSID |
| | | | NCDRNDAGKYILKLENSSGSKSAFVTVKVLDTPGPPQ |
| | | | NLAVKEVRKDSAFLVWEPPIIDGGAKVKNYVIDKRES |
| | | | TRKAYANVSSKCSKTSEKVENLTEGAIYYFRVMAENE |
| | | | FGVGVPVETVDAVKAAEPPSPPGKVTLTDVSQTSASL |
| | | | MWEKPEHDGGSRVLGYVVEMQPKGTEKWSIVAESKVC |
| | | | NAVVTGLSSGQEYQFRVKAYNEKGKSDPRVLGVPVIA |
| | | | KDLTIQPSLKLPENTYSIQAGEDLKIEIPVIGRPRPN |
| | | | ISWVKDGEPLKQTTRVNVEETATSTVLHIKEGNKDDE |
| | | | GKYTVTATNSAGTATENLSVIVLEKPGPPVGPVREDE |
| | | | VSADFVVISWEPPAYTGGCQISNYIVEKRDTTTTTWH |
| | | | MVSATVARTTIKITKLKTGTEYQFRIFAENRYGKSAP |
| | | | LDSKAVIVQYPFKEPGPPGTPFVTSISKDQMLVQWHE |
| | | | PVNDGGTKIIGYHLEQKEKNSILWVKLNKTPIQDTKE |
| | | | KTTGLDEGLEYEFKVSAENIVGIGKPSKVSECFVARD |
| | | | PCDPPGRPEAIVITRNNVTLKWKKPAYDGGSKITGYI |
| | | | VEKKDLPDGRWMKASFTNVLETEFTVSGLVEDQRYEF |
| | | | RVIARNAAGNESEPSDSSGAITARDEIDAPNASLDPK |
| | | | YKDVIVVHAGETFVLEADIRGKPIPDVVWSKDGKELE |
| | | | ETAARMEIKSTIQKTTLVVKDCIRTDGGQYILKLSNV |
| | | | GGTKSIPITVKVLDRPGPPEGPLKVTGVTAEKCYLAW |
| | | | NPPLQDGGANISHYIIEKRETSRLSWTQVSTEVQALN |
| | | | YKVTKLLPGNEYIFRVMAVNKYGIGEPLESGPVTACN |
| | | | PYKPPGPPSTPEVSAITKDSMVVTWARPVDDGGTEIE |
| | | | GYILEKRDKEGVRWTKCNKKTLTDLRLRVTGLTEGHS |
| | | | YEFRVAAENAAGVGEPSEPSVFYRACDALYPPGPPSN |
| | | | PKVTDTSRSSVSLAWSKPIYDGGAPVKGYVVEVKEAA |
| | | | ADEWTTCTPPTGLQGKQFTVTKLKENTEYNFRICAIN |
| | | | SEGVGEPATLPGSVVAQERIEPPEIELDADLRKVVVL |
| | | | RASATLRLFVTIKGRPEPEVKWEKAEGILTDRAQIEV |
| | | | TSSFTMLVIDNVTREDSGRYNLTLENNSGSKTAFVNV |
| | | | RVLDSPSAPVNLTIREVKKDSVTLSWEPPLIDGGAKI |
| | | | TNYIVEKRETTRKAYATITNNCTKTTFRIENLQEGCS |
| | | | YYFRVLASNEYGIGLPAETTEPVKVSEPPLPPGRVTL |
| | | | VDVTRNTATIKWEKPESDGGSKITGYVVEMQTKGSEK |
| | | | WSTCTQVKTLEATISGLTAGEEYVERVAAVNEKGRSD |
| | | | PRQLGVPVIARDIEIKPSVELPFHTENVKAREQLK |
| | | | IDVPFKGRPQATVNWRKDGQTLKETTRVNVSSSKTVT |
| | | | SLSIKEASKEDVGTYELCVSNSAGSITVPITIIVLDR |
| | | | PGPPGPIRIDEVSCDSITISWNPPEYDGGCQISNYIV |
| | | | EKKETTSTTWHIVSQAVARTSIKIVRLTTGSEYQFRV |
| | | | CAENRYGKSSYSESSAVVAEYPFSPPGPPGTPKVVHA |
| | | | TKSTMLVTWQVPVNDGGSRVIGYHLEYKERSSILWSK |
| | | | ANKILIADTQMKVSGLDEGLMYEYRVYAENIAGIGKC |
| | | | SKSCEPVPARDPCDPPGQPEVTNITRKSVSLKWSKPH |
| | | | YDGGAKITGYIVERRELPDGRWLKCNYTNIQETYFEV |
| | | | TELTEDQRYEFRVFARNAADSVSEPSESTGPIIVKDD |
| | | | VEPPRVMMDVKERDVIVVKAGEVLKINADIAGRPLPV |
| | | | ISWAKDGIEIEERARTEIISTDNHTLLTVKDCIRRDT |
| | | | GQYVLTLKNVAGTRSVAVNCKVLDKPGPPAGPLEING |
| | | | LTAEKCSLSWGRPQEDGGADIDYYIVEKRETSHLAWT |
| | | | ICEGELQMTSCKVTKLLKGNEYIFRVTGVNKYGVGEP |
| | | | LESVAIKALDPFTVPSPPTSLEITSVTKESMTLCWSR |
| | | | PESDGGSEISGYIIERREKNSLRWVRVNKKPVYDLRV |
| | | | KSTGLREGCEYEYRVYAENAAGLSLPSETSPLIRAED |
| | | | PVFLPSPPSKPKIVDSGKTTITIAWVKPLEDGGAPIT |
| | | | GYTVEYKKSDDTDWKTSIQSLRGTEYTISGLTTGAEY |
| | | | VFRVKSVNKVGASDPSDSSDPQIAKEREEEPLEDIDS |
| | | | EMRKTLIVKAGASFTMTVPFRGRPVPNVLWSKPDTDL |
| | | | RTRAYVDTTDSRTSLTIENANRNDSGKYTLTIQNVLS |
| | | | AASLTLVVKVLDTPGPPTNITVQDVTKESAVLSWDVP |
| | | | ENDGGAPVKNYHIEKREASKKAWVSVTNNCNRLSYKV |
| | | | TNLQEGAIYYFRVSGENEFGVGIPAETKEGVKITEKP |
| | | | SPPEKLGVTSISKDSVSLTWLKPEHDGGSRIVHYVVE |
| | | | ALEKGQKNWVKCAVAKSTHHVVSGLRENSEYFFRVFA |
| | | | ENQAGLSDPRELLLPVLIKEQLEPPEIDMKNFPSHTV |
| | | | YVRAGSNLKVDIPISGKPLPKVTLSRDGVPLKATMRF |
| | | | NTEITAENLTINLKESVTADAGRYEITAANSSGTTKA |
| | | | FINIVVLDRPGPPTGPVVISDITEESVTLKWEPPKYD |
| | | | GGSQVTNYILLKRETSTAVWTEVSATVARTMMKVMKL |
| | | | TTGEEYQFRIKAENRFGISDHIDSACVTVKLPYTTPG |
| | | | PPSTPWVTNVTRESITVGWHEPVSNGGSAVVGYHLEM |
| | | | KDRNSILWQKANKLVIRTTHEKVTTISAGLIYEFRVY |
| | | | AENAAGVGKPSHPSEPVLAIDACEPPRNVRITDISKN |
| | | | SVSLSWQQPAFDGGSKITGYIVERRDLPDGRWTKASF |
| | | | TNVTETQFIISGLTQNSQYEFRVFARNAVGSISNPSE |
| | | | VVGPITCIDSYGGPVIDLPLEYTEVVKYRAGTSVKLR |
| | | | AGISGKPAPTIEWYKDDKELQTNALVCVENTTDLASI |
| | | | LIKDADRLNSGCYELKLRNAMGSASATIRVQILDKPG |
| | | | PPGGPIEFKTVTAEKITLLWRPPADDGGAKITHYIVE |
| | | | KRETSRVVWSMVSEHLEECIITTTKIIKGNEYIFRVR |
| | | | AVNKYGIGEPLESDSVVAKNAFVTPGPPGIPEVTKIT |
| | | | KNSMTVVWSRPIADGGSDISGYFLEKRDKKSLGWFKV |
| | | | LKETIRDTRQKVTGLTENSDYQYRVCAVNAAGQGPES |
| | | | EPSEFYKAADPIDPPGPPAKIRIADSTKSSITLGWSK |
| | | | PVYDGGSAVTGYVVEIRQGEEEEWTTVSTKGEVRTTE |
| | | | YVVSNLKPGVNYYFRVSAVNCAGQGEPIEMNEPVQAK |
| | | | DILEAPEIDLDVALRTSVIAKAGEDVQVLIPFKGRPP |
| | | | PTVTWRKDEKNLGSDARYSIENTDSSSLLTIPQVTRN |
| | | | DTGKYILTIENGVGEPKSSTVSVKVLDTPAACQKLQV |
| | | | KHVSRGTVTLLWDPPLIDGGSPIINYVIEKRDATKRT |
| | | | WSVVSHKCSSTSFKLIDLSEKTPFFFRVLAENEIGIG |
| | | | EPCETTEPVKAAEVPAPIRDLSMKDSTKTSVILSWTK |
| | | | PDFDGGSVITEYVVERKGKGEQTWSHAGISKTCEIEV |
| | | | SQLKEQSVLEFRVFAKNEKGLSDPVTIGPITVKELII |
| | | | TPEVDLSDIPGAQVTVRIGHNVHLELPYKGKPKPSIS |
| | | | WLKDGLPLKESEFVRFSKTENKITLSIKNAKKEHGGK |
| | | | YTVILDNAVCRIAVPITVITLGPPSKPKGPIREDEIK |
| | | | ADSVILSWDVPEDNGGGEITCYSIEKRETSQTNWKMV |
| | | | CSSVARTTFKVPNLVKDAEYQFRVRAENRYGVSQPLV |
| | | | SSIIVAKHQFRIPGPPGKPVIYNVTSDGMSLTWDAPV |
| | | | YDGGSEVTGFHVEKKERNSILWQKVNTSPISGREYRA |
| | | | TGLVEGLDYQFRVYAENSAGLSSPSDPSKFTLAVSPV |
| | | | DPPGTPDYIDVTRETITLKWNPPLRDGGSKIVGYSIE |
| | | | KRQGNERWVRCNFTDVSECQYTVTGLSPGDRYEFRII |
| | | | ARNAVGTISPPSQSSGIIMTRDENVPPIVEFGPEYED |
| | | | GLIIKSGESLRIKALVQGRPVPRVTWEKDGVEIEKRM |
| | | | NMEITDVLGSTSLFVRDATRDHRGVYTVEAKNASGSA |
| | | | KAEIKVKVQDTPGKVVGPIRFTNITGEKMTLWWDAPL |
| | | | NDGCAPITHYIIEKRETSRLAWALIEDKCEAQSYTAI |
| | | | KLINGNEYQFRVSAVNKFGVGRPLDSDPVVAQIQYTV |
| | | | PDAPGIPEPSNITGNSITLTWARPESDGGSEIQQYIL |
| | | | ERREKKSTRWVKVISKRPISETRFKVTGLTEGNEYEF |
| | | | HVMAENAAGVGPASGISRLIKCREPVNPPGPPTVVKV |
| | | | TDTSKTTVSLEWSKPVEDGGMEIIGYIIEMCKADLGD |
| | | | WHKVNAEACVKTRYTVTDLQAGEEYKERVSAINGAGK |
| | | | GDSCEVTGTIKAVDRLTAPELDIDANFKQTHVVRAGA |
| | | | SIRLFIAYQGRPTPTAVWSKPDSNLSLRADIHTTDSF |
| | | | STLTVENCNRNDAGKYTLTVENNSGSKSITFTVKVLD |
| | | | TPGPPGPITFKDVTRGSATLMWDAPLLDGGARIHHYV |
| | | | VEKREASRRSWQVISEKCTRQIFKVNDLAEGVPYYER |
| | | | VSAVNEYGVGEPYEMPEPIVATEQPAPPRRLDVVDTS |
| | | | KSSAVLAWLKPDHDGGSRITGYLLEMRQKGSDEWVEA |
| | | | GHTKQLTFTVERLVEKTEYEFRVKAKNDAGYSEPREA |
| | | | FSSVIIKEPQIEPTADLTGITNQLITCKAGSPFTIDV |
| | | | PISGRPAPKVTWKLEEMRLKETDRVSITTTKDRTTLT |
| | | | VKDSMRGDSGRYFLTLENTAGVKTFSVTVVVIGRPGP |
| | | | VTGPIEVSSVSAESCVLSWGEPKDGGGTEITNYIVEK |
| | | | RESGTTAWQLVNSSVKRTQIKVTHLTKYMEYSERVSS |
| | | | ENREGVSKPLESAPIIAEHPFVPPSAPTRPEVYHVSA |
| | | | NAMSIRWEEPYHDGGSKIIGYWVEKKERNTILWVKEN |
| | | | KVPCLECNYKVTGLVEGLEYQERTYALNAAGVSKASE |
| | | | ASRPIMAQNPVDAPGRPEVTDVTRSTVSLIWSAPAYD |
| | | | GGSKVVGYIIERKPVSEVGDGRWLKCNYTIVSDNEFT |
| | | | VTALSEGDTYEFRVLAKNAAGVISKGSESTGPVTCRD |
| | | | EYAPPKAELDARLHGDLVTIRAGSDLVLDAAVGGKPE |
| | | | PKIIWTKGDKELDLCEKVSLQYTGKRATAVIKFCDRS |
| | | | DSGKYTLTVKNASGTKAVSVMVKVLDSPGPCGKLTVS |
| | | | RVTQEKCTLAWSLPQEDGGAEITHYIVERRETSRLNW |
| | | | VIVEGECPTLSYVVTRLIKNNEYIFRVRAVNKYGPGV |
| | | | PVESEPIVARNSFTIPSPPGIPEEVGTGKEHIIIQWT |
| | | | KPESDGGNEISNYLVDKREKKSLRWTRVNKDYVVYDT |
| | | | RLKVTSLMEGCDYQFRVTAVNAAGNSEPSEASNFISC |
| | | | REPSYTPGPPSAPRVVDTTKHSISLAWTKPMYDGGTD |
| | | | IVGYVLEMQEKDTDQWYRVHTNATIRNTEFTVPDLKM |
| | | | GQKYSFRVAAVNVKGMSEYSESIAEIEPVERIEIPDL |
| | | | ELADDLKKTVTIRAGASLRLMVSVSGRPPPVITWSKQ |
| | | | GIDLASRAIIDTTESYSLLIVDKVNRYDAGKYTIEAE |
| | | | NQSGKKSATVLVKVYDTPGPCPSVKVKEVSRDSVTIT |
| | | | WEIPTIDGGAPVNNYIVEKREAAMRAFKTVTTKCSKT |
| | | | LYRISGLVEGTMYYFRVLPENIYGIGEPCETSDAVLV |
| | | | SEVPLVPAKLEVVDVTKSTVTLAWEKPLYDGGSRLTG |
| | | | YVLEACKAGTERWMKVVTLKPTVLEHTVTSLNEGEQY |
| | | | LFRIRAQNEKGVSEPRETVTAVTVQDLRVLPTIDLST |
| | | | MPQKTIHVPAGRPVELVIPIAGRPPPAASWEFAGSKL |
| | | | RESERVTVETHTKVAKLTIRETTIRDTGEYTLELKNV |
| | | | TGTTSETIKVIILDKPGPPTGPIKIDEIDATSITISW |
| | | | EPPELDGGAPLSGYVVEQRDAHRPGWLPVSESVTRST |
| | | | FKFTRLTEGNEYVERVAATNRFGIGSYLQSEVIECRS |
| | | | SIRIPGPPETLQIFDVSRDGMTLTWYPPEDDGGSQVT |
| | | | GYIVERKEVRADRWVRVNKVPVTMTRYRSTGLTEGLE |
| | | | YEHRVTAINARGSGKPSRPSKPIVAMDPIAPPGKPQN |
| | | | PRVTDTTRTSVSLAWSVPEDEGGSKVTGYLIEMQKVD |
| | | | QHEWTKCNTTPTKIREYTLTHLPQGAEYRERVLACNA |
| | | | GGPGEPAEVPGTVKVTEMLEYPDYELDERYQEGIFVR |
| | | | QGGVIRLTIPIKGKPFPICKWTKEGQDISKRAMIATS |
| | | | ETHTELVIKEADRGDSGTYDLVLENKCGKKAVYIKVR |
| | | | VIGSPNSPEGPLEYDDIQVRSVRVSWRPPADDGGADI |
| | | | LGYILERREVPKAAWYTIDSRVRGTSLVVKGLKENVE |
| | | | YHFRVSAENQFGISKPLKSEEPVTPKTPLNPPEPPSN |
| | | | PPEVLDVTKSSVSLSWSRPKDDGGSRVTGYYIERKET |
| | | | STDKWVRHNKTQITTTMYTVTGLVPDAEYQFRIIAQN |
| | | | DVGLSETSPASEPVVCKDPFDKPSQPGELEILSISKD |
| | | | SVTLQWEKPECDGGKEILGYWVEYRQSGDSAWKKSNK |
| | | | ERIKDKQFTIGGLLEATEYEFRVFAENETGLSRPRRT |
| | | | AMSIKTKLTSGEAPGIRKEMKDVTTKLGEAAQLSCQI |
| | | | VGRPLPDIKWYRFGKELIQSRKYKMSSDGRTHTLTVM |
| | | | TEEQEDEGVYTCIATNEVGEVETSSKLLLQATPQFHP |
| | | | GYPLKEKYYGAVGSTLRLHVMYIGRPVPAMTWFHGQK |
| | | | LLQNSENITIENTEHYTHLVMKNVQRKTHAGKYKVQL |
| | | | SNVFGTVDAILDVEIQDKPDKPTGPIVIEALLKNSAV |
| | | | ISWKPPADDGGSWITNYVVEKCEAKEGAEWQLVSSAI |
| | | | SVTTCRIVNLTENAGYYFRVSAQNTFGISDPLEVSSV |
| | | | VIIKSPFEKPGAPGKPTITAVTKDSCVVAWKPPASDG |
| | | | GAKIRNYYLEKREKKQNKWISVTTEEIRETVESVKNL |
| | | | IEGLEYEFRVKCENLGGESEWSEISEPITPKSDVPIQ |
| | | | APHFKEELRNLNVRYQSNATLVCKVTGHPKPIVKWYR |
| | | | QGKEIIADGLKYRIQEFKGGYHQLIIASVTDDDATVY |
| | | | QVRATNQGGSVSGTASLEVEVPAKIHLPKTLEGMGAV |
| | | | HALRGEVVSIKIPFSGKPDPVITWQKGQDLIDNNGHY |
| | | | QVIVTRSFTSLVEPNGVERKDAGFYVVCAKNRFGIDQ |
| | | | KTVELDVADVPDPPRGVKVSDVSRDSVNLTWTEPASD |
| | | | GGSKITNYIVEKCATTAERWLRVGQARETRYTVINLE |
| | | | GKTSYQFRVIAENKFGLSKPSEPSEPTITKEDKTRAM |
| | | | NYDEEVDETREVSMTKASHSSTKELYEKYMIAEDLGR |
| | | | GEFGIVHRCVETSSKKTYMAKFVKVKGTDQVLVKKEI |
| | | | SILNIARHRNILHLHESFESMEELVMIFEFISGLDIF |
| | | | ERINTSAFELNEREIVSYVHQVCEALQFLHSHNIGHE |
| | | | DIRPENIIYQTRRSSTIKIIEFGQARQLKPGDNFRLL |
| | | | FTAPEYYAPEVHQHDVVSTATDMWSLGTLVYVLLSGI |
| | | | NPFLAETNQQIIENIMNAEYTEDEEAFKEISIEAMDE |
| | | | VDRLLVKERKSRMTASEALQHPWLKQKIERVSTKVIR |
| | | | TLKHRRYYHTLIKKDLNMVVSAARISCGGAIRSQKGV |
| | | | SVAKVKVASIEIGPVSGQIMHAVGEEGGHVKYVCKIE |
| | | | NYDQSTQVTWYFGVRQLENSEKYEITYEDGVAILYVK |
| | | | DITKLDDGTYRCKVVNDYGEDSSYAELFVKGVREVYD |
| | | | YYCRRTMKKIKRRTDTMRLLERPPEFTLPLYNKTAYV |
| | | | GENVRFGVTITVHPEPHVTWYKSGQKIKPGDNDKKYT |
| | | | FESDKGLYQLTINSVTTDDDAEYTVVARNKYGEDSCK |
| | | | AKLTVTLHPPPTDSTLRPMFKRLLANAECQEGQSVCF |
| | | | EIRVSGIPPPTLKWEKDGQPLSLGPNIEIIHEGLDYY |
| | | | ALHIRDTLPEDTGYYRVTATNTAGSTSCQAHLQVERL |
| | | | RYKKQEFKSKEEHERHVQKQIDKTLRMAEILSGTESV |
| | | | PLTQVAKEALREAAVLYKPAVSTKTVKGEFRLEIEEK |
| | | | KEERKLRMPYDVPEPRKYKQTTIEEDQRIKQFVPMSD |
| | | | MKWYKKIRDQYEMPGKLDRVVQKRPKRIRLSRWEQFY |
| | | | VMPLPRITDQYRPKWRIPKLSQDDLEIVRPARRRTPS |
| | | | PDYDFYYRPRRRSLGDISDEELLLPIDDYLAMKRTEE |
| | | | ERLRLEEELELGFSASPPSRSPPHFELSSLRYSSPQA |
| | | | HVKVEETRKDFRYSTYHIPTKAEASTSYAELRERHAQ |
| | | | AAYRQPKQRQRIMAEREDEELLRPVTTTQHLSEYKSE |
| | | | LDEMSKEEKSRKKSRRQREVTEITEIEEEYEISKHAQ |
| | | | RESSSSASRLLRRRRSLSPTYIELMRPVSELIRSRPQ |
| | | | PAEEYEDDTERRSPTPERTRPRSPSPVSSERSLSRFE |
| | | | RSARFDIFSRYESMKAALKTQKTSERKYEVLSQQPFT |
| | | | LDHAPRITLRMRSHRVPCGQNTRFILNVQSKPTAEVK |
| | | | WYHNGVELQESSKIHYTNTSGVLTLEILDCHTDDSGT |
| | | | YRAVCTNYKGEASDYATLDVTGGDYTTYASQRRDEEV |
| | | | PRSVFPELTRTEAYAVSSFKKTSEMEASSSVREVKSQ |
| | | | MTETRESLSSYEHSASAEMKSAALEEKSLEEKSTTRK |
| | | | IKTTLAARILTKPRSMTVYEGESARFSCDTDGEPVPT |
| | | | VTWLRKGQVLSTSARHQVTTTKYKSTFEISSVQASDE |
| | | | GNYSVVVENSEGKQEAEFTLTIQKARVTEKAVTSPPR |
| | | | VKSPEPRVKSPEAVKSPKRVKSPEPSHPKAVSPTETK |
| | | | PTPTEKVQHLPVSAPPKITQFLKAEASKEIAKLTCVV |
| | | | ESSVLRAKEVTWYKDGKKLKENGHFQFHYSADGTYEL |
| | | | KINNLTESDQGEYVCEISGEGGTSKTNLQFMGQAFKS |
| | | | IHEKVSKISETKKSDQKTTESTVTRKTEPKAPEPISS |
| | | | KPVIVTGLQDTTVSSDSVAKFAVKATGEPRPTAIWTK |
| | | | DGKAITQGGKYKLSEDKGGFFLEIHKTDTSDSGLYTC |
| | | | TVKNSAGSVSSSCKLTIKAIKDTEAQKVSTQKTSEIT |
| | | | PQKKAVVQEEISQKALRSEEIKMSEAKSQEKLALKEE |
| | | | ASKVLISEEVKKSAATSLEKSIVHEEITKTSQASEEV |
| | | | RTHAEIKAFSTQMSINEGQRLVLKANIAGATDVKWVL |
| | | | NGVELTNSEEYRYGVSGSDQTLTIKQASHRDEGILTC |
| | | | ISKTKEGIVKCQYDLTLSKELSDAPAFISQPRSQNIN |
| | | | EGQNVLFTCEISGEPSPEIEWFKNNLPISISSNVSIS |
| | | | RSRNVYSLEIRNASVSDSGKYTIKAKNERGQCSATAS |
| | | | LMVLPLVEEPSREVVLRTSGDTSLQGSFSSQSVQMSA |
| | | | SKQEASFSSFSSSSASSMTEMKFASMSAQSMSSMQES |
| | | | FVEMSSSSFMGISNMTQLESSTSKMLKAGIRGIPPKI |
| | | | EALPSDISIDEGKVLTVACAFTGEPTPEVTWSCGGRK |
| | | | IHSQEQGRFHIENTDDLTTLIIMDVQKQDGGLYTLSL |
| | | | GNEFGSDSATVNIHIRSI |
| Cytoplasmic | DYNC1H1 | 236 | MSEPGGGGGEDGSAGLEVSAVQNVADVSVLQKHLRKL |
| dynein 1 heavy | Syndrome | | VPLLLEDGGEAPAALEAALEEKSALEQMRKFLSDPQV |
| chain 1 | | | HTVLVERSTLKEDVGDEGEEEKEFISYNINIDIHYGV |
| (DYNC1H1) | | | KSNSLAFIKRTPVIDADKPVSSQLRVLTLSEDSPYET |
| | | | LHSFISNAVAPFFKSYIRESGKADRDGDKMAPSVEKK |
| | | | IAELEMGLLHLQQNIEIPEISLPIHPMITNVAKQCYE |
| | | | RGEKPKVTDFGDKVEDPTELNQLQSGVNRWIREIQKV |
| | | | TKLDRDPASGTALQEISFWLNLERALYRIQEKRESPE |
| | | | VLLTLDILKHGKRFHATVSFDTDTGLKQALETVNDYN |
| | | | PLMKDEPLNDLLSATELDKIRQALVAIFTHLRKIRNT |
| | | | KYPIQRALRLVEAISRDLSSQLLKVLGTRKLMHVAYE |
| | | | EFEKVMVACFEVFQTWDDEYEKLQVLLRDIVKRKREE |
| | | | NLKMVWRINPAHRKLQARLDQMRKFRRQHEQLRAVIV |
| | | | RVLRPQVTAVAQQNQGEVPEPQDMKVAEVLEDAADAN |
| | | | AIEEVNLAYENVKEVDGLDVSKEGTEAWEAAMKRYDE |
| | | | RIDRVETRITARLRDQLGTAKNANEMFRIESRENALE |
| | | | VRPHIRGAIREYQTQLIQRVKDDIESLHDKFKVQYPQ |
| | | | SQACKMSHVRDLPPVSGSIIWAKQIDRQLTAYMKRVE |
| | | | DVLGKGWENHVEGQKLKQDGDSFRMKLNTQEIFDDWA |
| | | | RKVQQRNLGVSGRIFTIESTRVRGRTGNVLKLKVNEL |
| | | | PEIITLSKEVRNLKWLGFRVPLAIVNKAHQANQLYPE |
| | | | AISLIESVRTYERTCEKVEERNTISLLVAGLKKEVQA |
| | | | LIAEGIALVWESYKLDPYVQRLAETVENFQEKVDDLL |
| | | | IIEEKIDLEVRSLETCMYDHKTESEILNRVQKAVDDL |
| | | | NLHSYSNLPIWVNKLDMEIERILGVRLQAGLRAWTQV |
| | | | LLGQAEDKAEVDMDTDAPQVSHKPGGEPKIKNVVHEL |
| | | | RITNQVIYLNPPIEECRYKLYQEMFAWKMVVLSLPRI |
| | | | QSQRYQVGVHYELTEEEKFYRNALTRMPDGPVALEES |
| | | | YSAVMGIVSEVEQYVKVWLQYQCLWDMQAENIYNRLG |
| | | | EDLNKWQALLVQIRKARGTEDNAETKKEFGPVVIDYG |
| | | | KVQSKVNLKYDSWHKEVLSKFGQMLGSNMTEFHSQIS |
| | | | KSRQELEQHSVDTASTSDAVTFITYVQSLKRKIKQFE |
| | | | KQVELYRNGQRLLEKQRFQFPPSWLYIDNIEGEWGAF |
| | | | NDIMRRKDSAIQQQVANLQMKIVQEDRAVESRTTDLL |
| | | | TDWEKTKPVTGNLRPEEALQALTIYEGKFGRLKDDRE |
| | | | KCAKAKEALELTDTGLLSGSEERVQVALEELQDLKGV |
| | | | WSELSKVWEQIDQMKEQPWVSVQPRKLRQNLDALLNQ |
| | | | LKSFPARLRQYASYEFVQRLLKGYMKINMLVIELKSE |
| | | | ALKDRHWKQLMKRLHVNWVVSELTLGQIWDVDLQKNE |
| | | | AIVKDVLLVAQGEMALEEFLKQIREVWNTYELDLVNY |
| | | | QNKCRLIRGWDDLFNKVKEHINSVSAMKLSPYYKVFE |
| | | | EDALSWEDKLNRIMALFDVWIDVQRRWVYLEGIFTGS |
| | | | ADIKHLLPVETQRFQSISTEFLALMKKVSKSPLVMDV |
| | | | LNIQGVQRSLERLADLLGKIQKALGEYLERERSSFPR |
| | | | FYFVGDEDLLEIIGNSKNVAKLQKHFKKMFAGVSSII |
| | | | LNEDNSVVLGISSREGEEVMFKTPVSITEHPKINEWL |
| | | | TLVEKEMRVTLAKLLAESVTEVEIFGKATSIDPNTYI |
| | | | TWIDKYQAQLVVLSAQIAWSENVETALSSMGGGGDAA |
| | | | PLHSVLSNVEVTLNVLADSVLMEQPPLRRRKLEHLIT |
| | | | ELVHQRDVTRSLIKSKIDNAKSFEWLSQMRFYFDPKQ |
| | | | TDVLQQLSIQMANAKENYGFEYLGVQDKLVQTPLTDR |
| | | | CYLTMTQALEARLGGSPFGPAGTGKTESVKALGHQLG |
| | | | RFVLVENCDETFDFQAMGRIFVGLCQVGAWGCFDEEN |
| | | | RLEERMLSAVSQQVQCIQEALREHSNPNYDKTSAPIT |
| | | | CELLNKQVKVSPDMAIFITMNPGYAGRSNLPDNLKKL |
| | | | FRSLAMTKPDRQLIAQVMLYSQGERTAEVLANKIVPF |
| | | | FKLCDEQLSSQSHYDFGLRALKSVLVSAGNVKRERIQ |
| | | | KIKREKEERGEAVDEGEIAENLPEQEILIQSVCETMV |
| | | | PKLVAEDIPLLESLLSDVEPGVQYHRGEMTALREELK |
| | | | KVCQEMYLTYGDGEEVGGMWVEKVLQLYQITQINHGL |
| | | | MMVGPSGSGKSMAWRVLLKALERLEGVEGVAHIIDPK |
| | | | AISKDHLYGTLDPNTREWTDGLFTHVLRKIIDSVRGE |
| | | | LQKRQWIVEDGDVDPEWVENLNSVLDDNKLLTLPNGE |
| | | | RLSLPPNVRIMFEVQDLKYATLATVSRCGMVWFSEDV |
| | | | LSTDMIENNFLARLRSIPLDEGEDEAQRRRKGKEDEG |
| | | | EEAASPMLQIQRDAATIMQPYFTSNGLVTKALEHAFQ |
| | | | LEHIMDLTRLRCLGSLESMLHQACRNVAQYNANHPDE |
| | | | PMQIEQLERYIQRYLVYAILWSLSGDSRLKMRAELGE |
| | | | YIRRITTVPLPTAPNIPIIDYEVSISGEWSPWQAKVP |
| | | | QIEVETHKVAAPDVVVPTLDTVRHEALLYTWLAEHKP |
| | | | LVLCGPPGSGKTMTLFSALRALPDMEVVGLNESSATT |
| | | | PELLLKTFDHYCEYRRTPNGVVLAPVQLGKWLVLFCD |
| | | | EINLPDMDKYGTQRVISFIRQMVEHGGFYRTSDQTW |
| | | | VKLERIQFVGACNPPTDPGRKPLSHRFLRHVPVVYVD |
| | | | YPGPASLTQIYGTFNRAMLRLIPSLRTYAEPLTAAMV |
| | | | EFYTMSQERFTQDTQPHYIYSPREMTRWVRGIFEALR |
| | | | PLETLPVEGLIRIWAHEALRLFQDRLVEDEERRWTDE |
| | | | NIDTVALKHEPNIDREKAMSRPILYSNWLSKDYIPVD |
| | | | QEELRDYVKARLKVFYEEELDVPLVLENEVLDHVLRI |
| | | | DRIFRQPQGHLLLIGVSGAGKTTLSRFVAWMNGLSVY |
| | | | QIKVHRKYTGEDEDEDLRTVLRRSGCKNEKIAFIMDE |
| | | | SNVLDSGFLERMNTLLANGEVPGLFEGDEYATLMTQC |
| | | | KEGAQKEGLMLDSHEELYKWFTSQVIRNLHVVFTMNP |
| | | | SSEGLKDRAATSPALFNRCVLNWFGDWSTEALYQVGK |
| | | | EFTSKMDLEKPNYIVPDYMPVVYDKLPQPPSHREAIV |
| | | | NSCVFVHQTLHQANARLAKRGGRTMAITPRHYLDFIN |
| | | | HYANLFHEKRSELEEQQMHLNVGLRKIKETVDQVEEL |
| | | | RRDLRIKSQELEVKNAAANDKLKKMVKDQQEAEKKKV |
| | | | MSQEIQEQLHKQQEVIADKQMSVKEDLDKVEPAVIEA |
| | | | QNAVKSIKKQHLVEVRSMANPPAAVKLALESICLLLG |
| | | | ESTTDWKQIRSIIMRENFIPTIVNESAEEISDAIREK |
| | | | MKKNYMSNPSYNYEIVNRASLACGPMVKWAIAQLNYA |
| | | | DMLKRVEPLRNELQKLEDDAKDNQQKANEVEQMIRDL |
| | | | EASIARYKEEYAVLISEAQAIKADLAAVEAKVNRSTA |
| | | | LLKSLSAERERWEKTSETFKNQMSTIAGDCLLSAAFI |
| | | | AYAGYFDQQMRQNLFTTWSHHLQQANIQFRTDIARTE |
| | | | YLSNADERLRWQASSLPADDLCTENAIMLKRENRYPL |
| | | | IIDPSGQATEFIMNEYKDRKITRTSFLDDAFRKNLES |
| | | | ALREGNPLLVQDVESYDPVLNPVLNREVRRTGGRVLI |
| | | | TLGDQDIDLSPSFVIELSTRDPTVEFPPDLCSRVTFV |
| | | | NFTVTRSSLQSQCLNEVLKAERPDVDEKRSDLLKLQG |
| | | | EFQLRLRQLEKSLLQALNEVKGRILDDDTIITTLENL |
| | | | KREAAEVTRKVEETDIVMQEVETVSQQYLPLSTACSS |
| | | | IYFTMESLKQIHFLYQYSLQFFLDIYHNVLYENPNLK |
| | | | GVTDHTQRLSIITKDLFQVAFNRVARGMLHQDHITFA |
| | | | MLLARIKLKGTVGEPTYDAEFQHFLRGNEIVLSAGST |
| | | | PRIQGLTVEQAEAVVRLSCLPAFKDLIAKVQADEQFG |
| | | | IWLDSSSPEQTVPYLWSEETPATPIGQAIHRLLLIQA |
| | | | FRPDRLLAMAHMFVSTNLGESFMSIMEQPLDLTHIVG |
| | | | TEVKPNTPVLMCSVPGYDASGHVEDLAAEQNTQITSI |
| | | | AIGSAEGENQADKAINTAVKSGRWVMLKNVHLAPGWL |
| | | | MQLEKKLHSLQPHACERLELTMEINPKVPVNLLRAGR |
| | | | IFVFEPPPGVKANMLRTFSSIPVSRICKSPNERARLY |
| | | | FLLAWFHAIIQERLRYAPLGWSKKYEFGESDLRSACD |
| | | | TVDTWLDDTAKGRQNISPDKIPWSALKTLMAQSIYGG |
| | | | RVDNEFDQRLLNTFLERLFTTRSFDSEFKLACKVDGH |
| | | | KDIQMPDGIRREEFVQWVELLPDTQTPSWLGLPNNAE |
| | | | RVLLTTQGVDMISKMLKMQMLEDEDDLAYAETEKKTR |
| | | | TDSTSDGRPAWMRTLHTTASNWLHLIPQTLSHLKRTV |
| | | | ENIKDPLFRFFEREVKMGAKLLQDVRQDLADVVQVCE |
| | | | GKKKQTNYLRTLINELVKGILPRSWSHYTVPAGMTVI |
| | | | QWVSDFSERIKQLQNISLAAASGGAKELKNIHVCLGG |
| | | | LFVPEAYITATRQYVAQANSWSLEELCLEVNVTTSQG |
| | | | ATLDACSFGVTGLKLQGATCNNNKLSLSNAISTALPL |
| | | | TQLRWVKQTNTEKKASVVTLPVYLNFTRADLIFTVDE |
| | | | EIATKEDPRSFYERGVAVLCTE |
| TRIO and F- | TRIO-Related | 237 | MEEVPGDALCEHFEANILTQNRCQNCFHPEEAHGARY |
| actin-binding | ID | | QELRSPSGAEVPYCDLPRCPPAPEDPLSASTSGCQSV |
| protein (TRIO) | | | VDPGLRPGPKRGPSPSAGLPEEGPTAAPRSRSRELEA |
| | | | VPYLEGLTTSLCGSCNEDPGSDPTSSPDSATPDDTSN |
| | | | SSSVDWDTVERQEEEAPSWDELAVMIPRRPREGPRAD |
| | | | SSQRAPSLLTRSPVGGDAAGQKKEDTGGGGRSAGQHW |
| | | | ARLRGESGLSLERHRSTLTQASSMTPHSGPRSTTSQA |
| | | | SPAQRDTAQAASTREIPRASSPHRITQRDTSRASSTQ |
| | | | QEISRASSTQQETSRASSTQEDTPRASSTQEDTPRAS |
| | | | STQWNTPRASSPSRSTQLDNPRTSSTQQDNPQTSEPT |
| | | | CTPQRENPRTPCVQQDDPRASSPNRTTQRENSRTSCA |
| | | | QRDNPKASRTSSPNRATRDNPRTSCAQRDNPRASSPS |
| | | | RATRDNPTTSCAQRDNPRASRTSSPNRATRDNPRTSC |
| | | | AQRDNPRASSPSRATRDNPTTSCAQRDNPRASRTSSP |
| | | | NRATRDNPRTSCAQRDNPRASSPNRAARDNPTTSCAQ |
| | | | RDNPRASRTSSPNRATRDNPRTSCAQRDNPRASSPNR |
| | | | ATRDNPTTSCAQRDNPRASRTSSPNRATRDNPRTSCA |
| | | | QRDNPRASSPNRTTQQDSPRTSCARRDDPRASSPNRT |
| | | | IQQENPRTSCALRDNPRASSPSRTIQQENPRTSCAQR |
| | | | DDPRASSPNRTTQQENPRTSCARRDNPRASSRNRTIQ |
| | | | RDNPRTSCAQRDNPRASSPNRTIQQENLRTSCTRQDN |
| | | | PRTSSPNRATRDNPRTSCAQRDNLRASSPIRATQQDN |
| | | | PRTCIQQNIPRSSSTQQDNPKTSCTKRDNLRPTCTQR |
| | | | DRTQSFSFQRDNPGTSSSQCCTQKENLRPSSPHRSTQ |
| | | | WNNPRNSSPHRINKDIPWASFPLRPTQSDGPRTSSPS |
| | | | RSKQSEVPWASIALRPTQGDRPQTSSPSRPAQHDP |
| | | | PQSSFGPTQYNLPSRATSSSHNPGHQSTSRTSSPVYP |
| | | | AAYGAPLTSPEPSQPPCAVCIGHRDAPRASSPPRYLQ |
| | | | HDPFPFFPEPRAPESEPPHHEPPYIPPAVCIGHRDAP |
| | | | RASSPPRHTQFDPFPFLPDTSDAEHQCQSPQHEPLQL |
| | | | PAPVCIGYRDAPRASSPPRQAPEPSLLFQDLPRASTE |
| | | | SLVPSMDSLHECPHIPTPVCIGHRDAPSESSPPRQAP |
| | | | EPSLFFQDPPGTSMESLAPSTDSLHGSPVLIPQVCIG |
| | | | HRDAPRASSPPRHPPSDLAFLAPSPSPGSSGGSRGSA |
| | | | PPGETRHNLEREEYTVLADLPPPRRLAQRQPGPQAQC |
| | | | SSGGRTHSPGRAEVERLFGQERRKSEAAGAFQAQDEG |
| | | | RSQQPSQGQSQLLRRQSSPAPSRQVTMLPAKQAELTR |
| | | | RSQAEPPHPWSPEKRPEGDRQLQGSPLPPRTSARTPE |
| | | | RELRTQRPLESGQAGPRQPLGVWQSQEEPPGSQGPH |
| | | | RHLERSWSSQEGGLGPGGWWGCGEPSLGAAKAPEGAW |
| | | | GGTSREYKESWGQPEAWEEKPTHELPRELGKRSPLTS |
| | | | PPENWGGPAESSQSWHSGTPTAVGWGAEGACPYPRGS |
| | | | ERRPELDWRDLLGLLRAPGEGVWARVPSLDWEGLLEL |
| | | | LQARLPRKDPAGHRDDLARALGPELGPPGTNDVPEQE |
| | | | SHSQPEGWAEATPVNGHSPALQSQSPVQLPSACTSTQ |
| | | | WPKIKVTRGPATATLAGLEQTGPLGSRSTAKGPSLPE |
| | | | LQFQPEEPEESEPSRGDPLTDQKQADSADKRPAEGKA |
| | | | GSPLKGRLVTSWRMPGDRPTLFNPFLLSLGVLRWRRP |
| | | | DLLNEKKGWMSILDEPGEPPSPSLTTTSTSQWKKHWE |
| | | | VLTDSSLKYYRDSTAEEADELDGEIDLRSCTDVTEYA |
| | | | VQRNYGFQIHTKDAVYTLSAMTSGIRRNWIEALRKTV |
| | | | RPTSAPDVTKLSDSNKENALHSYSTQKGPLKAGEQRA |
| | | | GSEVISRGGPRKADGQRQALDYVELSPLTQASPQRAR |
| | | | TPARTPDRLAKQEELERDLAQRSEERRKWFEATDSRT |
| | | | PEVPAGEGPRRGLGAPLTEDQQNRLSEEIEKKWQELE |
| | | | KLPLRENKRVPLTALLNQSRGERRGPPSDGHEALEKE |
| | | | VQALRAQLEAWRLQGEAPQSALRSQEDGHIPPGYISQ |
| | | | EACERSLAEMESSHQQVMEELQRHHERELQRLQQEKE |
| | | | WLLAEETAATASAIEAMKKAYQEELSRELSKTRSLQQ |
| | | | GPDGLRKQHQSDVEALKRELQVLSEQYSQKCLEIGAL |
| | | | MRQAEEREHTLRRCQQEGQELLRHNQELHGRLSEEID |
| | | | QLRGFIASQGMGNGCGRSNERSSCELEVLLRVKENEL |
| | | | QYLKKEVQCLRDELQMMQKDKRFTSGKYQDVYVELSH |
| | | | IKTRSEREIEQLKEHLRLAMAALQEKESMRNSLAE |
| Probable | USP9X | 238 | MTATTRGSPVGGNDNQGQAPDGQSQPPLQQNQTSSPD |
| ubiquitin | Development | | SSNENSPATPPDEQGQGDAPPQLEDEEPAFPHTDLAK |
| carboxyl- | Disorder | | LDDMINRPRWVVPVLPKGELEVLLEAAIDLSKKGLDV |
| terminal | | | KSEACQRFFRDGLTISFTKILTDEAVSGWKFEIHRCI |
| hydrolase FAF- | | | INNTHRLVELCVAKLSQDWFPLLELLAMALNPHCKFH |
| X | | | IYNGTRPCESVSSSVQLPEDELFARSPDPRSPKGWLV |
| (USP9X) | | | DLLNKFGTLNGFQILHDRFINGSALNVQIIAALIKPE |
| | | | GQCYEFLTLHTVKKYFLPIIEMVPQFLENLTDEELKK |
| | | | EAKNEAKNDALSMIIKSLKNLASRVPGQEETVKNLEI |
| | | | FRLKMILRLLQISSENGKMNALNEVNKVISSVSYYTH |
| | | | RHGNPEEEEWLTAERMAEWIQQNNILSIVLRDSLHQP |
| | | | QYVEKLEKILRFVIKEKALTLQDLDNIWAAQAGKHEA |
| | | | IVKNVHDLLAKLAWDESPEQLDHLEDCFKASWTNAS |
| | | | KKQREKLLELIRRLAEDDKDGVMAHKVLNLLWNLAHS |
| | | | DDVPVDIMDLALSAHIKILDYSCSQDRDTQKIQWIDR |
| | | | FIEELRTNDKWVIPALKQIREICSLFGEAPQNLSQTQ |
| | | | RSPHVFYRHDLINQLQHNHALVTLVAENLATYMESMR |
| | | | LYARDHEDYDPQTVRLGSRYSHVQEVQERLNFLRELL |
| | | | KDGQLWLCAPQAKQIWKCLAENAVYLCDREACFKWYS |
| | | | KLMGDEPDLDPDINKDFFESNVLQLDPSLLTENGMKC |
| | | | FERFFKAVNCREGKLVAKRRAYMMDDLELIGLDYLWR |
| | | | VVIQSNDDIASRAIDLLKEIYTNLGPRLQVNQVVIHE |
| | | | DFIQSCFDRLKASYDTLCVLDGDKDSVNCARQEAVRM |
| | | | VRVLTVLREYINECDSDYHEERTILPMSRAFRGKHLS |
| | | | FVVRFPNQGRQVDDLEVWSHTNDTIGSVRRCILNRIK |
| | | | ANVAHTKIELFVGGELIDPADDRKLIGQLNLKDKSLI |
| | | | TAKLTQISSNMPSSPDSSSDSSTGSPGNHGNHYSDGP |
| | | | NPEVESCLPGVIMSLHPRYISFLWQVADLGSSLNMPP |
| | | | LRDGARVLMKLMPPDSTTIEKLRAICLDHAKLGESSL |
| | | | SPSLDSLFFGPSASQVLYLTEVVYALLMPAGAPLADD |
| | | | SSDFQFHFLKSGGLPLVLSMLTRNNFLPNADMETRRG |
| | | | AYLNALKIAKLLLTAIGYGHVRAVAEACQPGVEGVNP |
| | | | MTQINQVTHDQAVVLQSALQSIPNPSSECMLRNVSVR |
| | | | LAQQISDEASRYMPDICVIRAIQKIIWASGCGSLQLV |
| | | | FSPNEEITKIYEKTNAGNEPDLEDEQVCCEALEVMTL |
| | | | CFALIPTALDALSKEKAWQTFIIDLLLHCHSKTVRQV |
| | | | AQEQFFLMCTRCCMGHRPLLFFITLLFTVLGSTARER |
| | | | AKHSGDYFTLLRHLLNYAYNSNINVPNAEVLLNNEID |
| | | | WLKRIRDDVKRTGETGIEETILEGHLGVTKELLAFQT |
| | | | SEKKFHIGCEKGGANLIKELIDDFIFPASNVYLQYMR |
| | | | NGELPAEQAIPVCGSPPTINAGFELLVALAVGCVRNL |
| | | | KQIVDSLTEMYYIGTAITTCEALTEWEYLPPVGPRPP |
| | | | KGFVGLKNAGATCYMNSVIQQLYMIPSIRNGILAIEG |
| | | | TGSDVDDDMSGDEKQDNESNVDPRDDVEGYPQQFEDK |
| | | | PALSKTEDRKEYNIGVLRHLQVIFGHLAASRLQYYVP |
| | | | RGFWKQFRLWGEPVNLREQHDALEFENSLVDSLDEAL |
| | | | KALGHPAMLSKVLGGSFADQKICQGCPHRYECEESFT |
| | | | TLNVDIRNHQNLLDSLEQYVKGDLLEGANAYHCEKCN |
| | | | KKVDTVKRLLIKKLPPVLAIQLKREDYDWERECAIKF |
| | | | NDYFEFPRELDMEPYTVAGVAKLEGDNVNPESQLIQQ |
| | | | SEQSESETAGSTKYRLVGVLVHSGQASGGHYYSYIIQ |
| | | | RNGGDGERNRWYKFDDGDVTECKMDDDEEMKNQCFGG |
| | | | EYMGEVFDHMMKRMSYRRQKRWWNAYILFYERMDTID |
| | | | QDDELIRYISELAITTRPHQIIMPSAIERSVRKQNVQ |
| | | | FMHNRMQYSMEYFQFMKKLLTCNGVYLNPPPGQDHLL |
| | | | PEAEEITMISIQLAARFLFTTGEHTKKVVRGSASDWY |
| | | | DALCILLRHSKNVRFWFAHNVLENVSNRESEYLLECP |
| | | | SAEVRGAFAKLIVFIAHFSLQDGPCPSPFASPGPSSQ |
| | | | AYDNLSLSDHLLRAVLNLLRREVSEHGRHLQQYENLE |
| | | | VMYANLGVAEKTQLLKLSVPATFMLVSLDEGPGPPIK |
| | | | YQYAELGKLYSVVSQLIRCCNVSSRMQSSINGNPPLP |
| | | | NPFGDPNLSQPIMPIQQNVADILFVRTSYVKKIIEDC |
| | | | SNSEETVKLLRFCCWENPQFSSTVLSELLWQVAYSYT |
| | | | YELRPYLDLLLQILLIEDSWQTHRIHNALKGIPDDRD |
| | | | GLFDTIQRSKNHYQKRAYQCIKCMVALFSNCPVAYQI |
| | | | LQGNGDLKRKWTWAVEWLGDELERRPYTGNPQYTYNN |
| | | | WSPPVQSNETSNGYFLERSHSARMTLAKACELCPEEE |
| | | | PDDQDAPDEHESPPPEDAPLYPHSPGSQYQQNNHVHG |
| | | | QPYTGPAAHHMNNPQRTGQRAQENYEGSEEVSPPQTK |
| | | | DQ |
| Pyrin domain- | — | 287 | MASSAELDENLQALLEQLSQDELSKEKSLIRTISLGK |
| containing | | | ELQTVPQTEVDKANGKQLVEIFTSHSCSYWAGMAAIQ |
| protein 2 | | | VFEKMNQTHLSGRADEHCVMPPP |
| (PYDC2) | | | |
| Cystatin-B | Epilepsy, | 288 | MMCGAPSATQPATAETQHIADQVRSQLEEKENKKFPV |
| (CSTB) | progressive | | FKAVSFKSQVVAGTNYFIKVHVGDEDFVHLRVFQSLP |
| | myoclonic 1 | | HENKPLTLSNYQTNKAKHDELTYF |
| | (EPM1) | | |
| Pterin-4-alpha- | Hyperphenyl- | 289 | MAGKAHRLSAEERDQLLPNLRAVGWNELEGRDAIFKQ |
| carbinolamine | alaninemia, BH4- | | FHFKDENRAFGEMTRVALQAEKLDHHPEWENVYNKVH |
| dehydratase | deficient, D | | ITLSTHECAGLSERDINLASFIEQVAVSMT |
| (PCBD1) | (HPABH4D) | | |

### 5.3.2.2 Anti-SYNGAP1 Single Domain Antibodies

[0199] In one aspect, provided herein is a single domain antibody (e.g., a VHH) that specifically binds SYNGAP1 (e.g., human SYNGAP1). In some embodiments, the single domain antibody is a VHH (i.e. a nanobody). In some embodiments, the VHH comprises three complementarity determining regions: VH CDR1, VH CDR2, and VH CDR3. The CDRs below are defined according to Kabat.

[0200] In some embodiments, the VHH comprises a CDR1 that comprises the amino acid sequence of SEQ ID NO: 290, 294, 298, 302, 306, or 310, or the amino acid sequence of SEQ ID NO: 290, 294, 298, 302, 306, or 310 with 1, 2, or 3 amino acid modifications (e.g., a substitution, deletion, or addition); a CDR2 that comprises the amino acid sequence of SEQ ID NO: 291, 295, 299, 303, 307, or 311, or the amino acid sequence of SEQ ID NO: 291, 295, 299, 303, 307, or 311 with 1, 2, or 3 amino acid modifications (e.g., a substitution, deletion, or addition); and/or a CDR3 that comprises the amino acid sequence of SEQ ID NO: 292, 296, 300, 304, 308, or 312 or the amino acid sequence of SEQ ID NO: 292, 296, 300, 304, 308, or 312 with 1, 2, or 3 amino acid modifications (e.g., a substitution, deletion, or addition).

[0201] In some embodiments, the VHH comprises a CDR1 that comprises the amino acid sequence of SEQ ID NO: 290, or the amino acid sequence of SEQ ID NO: 290 with 1, 2, or 3 amino acid modifications (e.g., a substitution, deletion, or addition); a CDR2 that comprises the amino acid sequence of SEQ ID NO: 291, or the amino acid sequence of SEQ ID NO: 291 with 1, 2, or 3 amino acid modifications (e.g., a substitution, deletion, or addition); and a CDR3 that comprises the amino acid sequence of SEQ ID NO: 292, or the amino acid sequence of SEQ ID NO: 292 with 1, 2, or 3 amino acid modifications (e.g., a substitution, deletion, or addition).

[0202] In some embodiments, the VHH comprises a CDR1 that comprises an amino acid sequence at least 95%, 96%, 97%, 98%, 99%, or 100% identical to the amino acid sequence of SEQ ID NO: 290; a CDR2 that comprises an amino acid sequence at least 95%, 96%, 97%, 98%, 99%, or 100% to the amino acid sequence of SEQ ID NO: 291; and a CDR3 that comprises an amino acid sequence at least 95%, 96%, 97%, 98%, 99%, or 100% identical to the amino acid sequence of SEQ ID NO: 292.

[0203] In some embodiments, the VHH comprises a CDR1 that comprises the amino acid sequence of SEQ ID NO: 294, or the amino acid sequence of SEQ ID NO: 294 with 1, 2, or 3 amino acid modifications (e.g., a substitution, deletion, or addition); a CDR2 that comprises the amino acid sequence of SEQ ID NO: 295, or the amino acid sequence of SEQ ID NO: 295 with 1, 2, or 3 amino acid modifications (e.g., a substitution, deletion, or addition); and a CDR3 that comprises the amino acid sequence of SEQ ID NO: 296, or the amino acid sequence of SEQ ID NO: 296 with 1, 2, or 3 amino acid modifications (e.g., a substitution, deletion, or addition).

[0204] In some embodiments, the VHH comprises a CDR1 that comprises an amino acid sequence at least 95%, 96%, 97%, 98%, 99%, or 100% identical to the amino acid sequence of SEQ ID NO: 294; a CDR2 that comprises an amino acid sequence at least 95%, 96%, 97%, 98%, 99%, or 100% to the amino acid sequence of SEQ ID NO: 295; and a CDR3 that comprises an amino acid sequence at least 95%, 96%, 97%, 98%, 99%, or 100% identical to the amino acid sequence of SEQ ID NO: 296.

[0205] In some embodiments, the VHH comprises a VH CDR1 that comprises the amino acid sequence of SEQ ID NO: 298, or the amino acid sequence of SEQ ID NO: 298 with 1, 2, or 3 amino acid modifications (e.g., a substitution, deletion, or addition); a CDR2 that comprises the amino acid sequence of SEQ ID NO: 299, or the amino acid sequence of SEQ ID NO: 299 with 1, 2, or 3 amino acid modifications (e.g., a substitution, deletion, or addition); and a CDR3 that comprises the amino acid sequence of SEQ ID NO: 300, or the amino acid sequence of SEQ ID NO: 300 with 1, 2, or 3 amino acid modifications (e.g., a substitution, deletion, or addition).

[0206] In some embodiments, the VHH comprises a CDR1 that comprises an amino acid sequence at least 95%, 96%, 97%, 98%, 99%, or 100% identical to the amino acid sequence of SEQ ID NO: 298; a CDR2 that comprises an amino acid sequence at least 95%, 96%, 97%, 98%, 99%, or 100% to the amino acid sequence of SEQ ID NO: 299; and a CDR3 that comprises an amino acid sequence at least 95%, 96%, 97%, 98%, 99%, or 100% identical to the amino acid sequence of SEQ ID NO: 300.

[0207] In some embodiments, the VHH comprises a CDR1 that comprises the amino acid sequence of SEQ ID NO: 302, or the amino acid sequence of SEQ ID NO: 302 with 1, 2, or 3 amino acid modifications (e.g., a substitution, deletion, or addition); a CDR2 that comprises the amino acid sequence of SEQ ID NO: 303, or the amino acid sequence of SEQ ID NO: 303 with 1, 2, or 3 amino acid modifications (e.g., a substitution, deletion, or addition); and a CDR3 that comprises the amino acid sequence of SEQ ID NO: 304, or the amino acid sequence of SEQ ID NO: 304 with 1, 2, or 3 amino acid modifications (e.g., a substitution, deletion, or addition).

[0208] In some embodiments, the VHH comprises a CDR1 that comprises an amino acid sequence at least 95%, 96%, 97%, 98%, 99%, or 100% identical to the amino acid sequence of SEQ ID NO: 302; a CDR2 that comprises an amino acid sequence at least 95%, 96%, 97%, 98%, 99%, or 100% to the amino acid sequence of SEQ ID NO: 303; and a CDR3 that comprises an amino acid sequence at least 95%, 96%, 97%, 98%, 99%, or 100% identical to the amino acid sequence of SEQ ID NO: 304.

[0209] In some embodiments, the VHH comprises a CDR1 that comprises the amino acid sequence of SEQ ID NO: 306, or the amino acid sequence of SEQ ID NO: 306 with 1, 2, or 3 amino acid modifications (e.g., a substitution, deletion, or addition); a CDR2 that comprises the amino acid sequence of SEQ ID NO: 307, or the amino acid sequence of SEQ ID NO: 307 with 1, 2, or 3 amino acid modifications (e.g., a substitution, deletion, or addition); and a CDR3 that comprises the amino acid sequence of SEQ ID NO: 308, or the amino acid sequence of SEQ ID NO: 308 with 1, 2, or 3 amino acid modifications (e.g., a substitution, deletion, or addition).

[0210] In some embodiments, the VHH comprises a CDR1 that comprises an amino acid sequence at least 95%, 96%, 97%, 98%, 99%, or 100% identical to the amino acid sequence of SEQ ID NO: 306; a CDR2 that comprises an amino acid sequence at least 95%, 96%, 97%, 98%, 99%, or 100% to the amino acid sequence of SEQ ID NO: 307; and a CDR3 that comprises an amino acid sequence at least 95%, 96%, 97%, 98%, 99%, or 100% identical to the amino acid sequence of SEQ ID NO: 308.

[0211] In some embodiments, the VHH comprises a CDR1 that comprises the amino acid sequence of SEQ ID NO: 310, or the amino acid sequence of SEQ ID NO: 310 with 1, 2, or 3 amino acid modifications (e.g., a substitution, deletion, or addition); a CDR2 that comprises the amino acid sequence of SEQ ID NO: 311, or the amino acid sequence of SEQ ID NO: 311 with 1, 2, or 3 amino acid modifications (e.g., a substitution, deletion, or addition); and a CDR3 that comprises the amino acid sequence of SEQ ID NO: 312, or the amino acid sequence of SEQ ID NO: 312 with 1, 2, or 3 amino acid modifications (e.g., a substitution, deletion, or addition).

[0212] In some embodiments, the VHH comprises a CDR1 that comprises an amino acid sequence at least 95%, 96%, 97%, 98%, 99%, or 100% identical to the amino acid sequence of SEQ ID NO: 310; a CDR2 that comprises an amino acid sequence at least 95%, 96%, 97%, 98%, 99%, or 100% to the amino acid sequence of SEQ ID NO: 311; and a CDR3 that comprises an amino acid sequence at least 95%, 96%, 97%, 98%, 99%, or 100% identical to the amino acid sequence of SEQ ID NO: 312.

[0213] In some embodiments, the VHH comprises an amino acid sequence at least 90%, 91%, 92%, 93%, 94%, 95%, 96%, 97%, 98%, 99%, or 100% identical to the amino acid sequence of SEQ ID NO: 293, 297, 301, 305, 309, or 312.

[0214] In some embodiments, the VHH comprises an amino acid sequence at least 90%, 91%, 92%, 93%, 94%, 95%, 96%, 97%, 98%, 99%, or 100% identical to the amino acid sequence of SEQ ID NO: 293.

[0215] In some embodiments, the VHH comprises an amino acid sequence at least 90%, 91%, 92%, 93%, 94%, 95%, 96%, 97%, 98%, 99%, or 100% identical to the amino acid sequence of SEQ ID NO: 297.

[0216] In some embodiments, the VHH comprises an amino acid sequence at least 90%, 91%, 92%, 93%, 94%, 95%, 96%, 97%, 98%, 99%, or 100% identical to the amino acid sequence of SEQ ID NO: 301.

[0217] In some embodiments, the VHH comprises an amino acid sequence at least 90%, 91%, 92%, 93%, 94%, 95%, 96%, 97%, 98%, 99%, or 100% identical to the amino acid sequence of SEQ ID NO: 305.

[0218] In some embodiments, the VHH comprises an amino acid sequence at least 90%, 91%, 92%, 93%, 94%, 95%, 96%, 97%, 98%, 99%, or 100% identical to the amino acid sequence of SEQ ID NO: 309.

[0219] In some embodiments, the VHH comprises an amino acid sequence at least 90%, 91%, 92%, 93%, 94%, 95%, 96%, 97%, 98%, 99%, or 100% identical to the amino acid sequence of SEQ ID NO: 313.

[0220] Also provided herein are (VHH)₂ antibodies that specifically bind SYNGAP1. The first VHH and the second VHH of a (VHH)₂ may be directly connected or indirectly connected via an amino acid linker. Exemplary amino acid linkers include the amino acid sequence of any one of SEQ ID NOS: 375-384. In some embodiments, the amino acid sequence of the linker is at least 95%, 96%, 97%, 98%, 99%, or 100% identical to the amino acid sequence of any one of SEQ ID NOS: 375-384. In some embodiments, the amino acid sequence of the linker is at least 95%, 96%, 97%, 98%, 99%, or 100% identical to the amino acid sequence of SEQ ID NO: 375. In some embodiments, the amino acid sequence of the linker is at least 95%, 96%, 97%, 98%, 99%, or 100% identical to the amino acid sequence of SEQ ID NO: 376. In some embodiments, the amino acid sequence of the linker is at least 95%, 96%, 97%, 98%, 99%, or 100% identical to the amino acid sequence of SEQ ID NO: 377. In some embodiments, the amino acid sequence of the linker is at least 95%, 96%, 97%, 98%, 99%, or 100% identical to the amino acid sequence of SEQ ID NO: 378. In some embodiments, the amino acid sequence of the linker is at least 95%, 96%, 97%, 98%, 99%, or 100% identical to the amino acid sequence of SEQ ID NO: 379. In some embodiments, the amino acid sequence of the linker is at least 95%, 96%, 97%, 98%, 99%, or 100% identical to the amino acid sequence of SEQ ID NO: 380. In some embodiments, the amino acid sequence of the linker is at least 95%, 96%, 97%, 98%, 99%, or 100% identical to the amino acid sequence of SEQ ID NO: 381. In some embodiments, the amino acid sequence of the linker is at least 95%, 96%, 97%, 98%, 99%, or 100% identical to the amino acid sequence of SEQ ID NO: 382. In some embodiments, the amino acid sequence of the linker is at least 95%, 96%, 97%, 98%, 99%, or 100% identical to the amino acid sequence of SEQ ID NO: 383. In some embodiments, the amino acid sequence of the linker is at least 95%, 96%, 97%, 98%, 99%, or 100% identical to the amino acid sequence of SEQ ID NO: 384.

[0221] In some embodiments, the (VHH)₂ comprises a first VHH comprising a CDR1 that comprises the amino acid sequence of SEQ ID NO: 290, 294, 298, 302, 306, or 310, or the amino acid sequence of SEQ ID NO: 290, 294, 298, 302, 306, or 310 with 1, 2, or 3 amino acid modifications (e.g., a substitution, deletion, or addition); a CDR2 that comprises the amino acid sequence of SEQ ID NO: 291, 295, 299, 303, 307, or 311, or the amino acid sequence of SEQ ID NO: 291, 295, 299, 303, 307, or 311 with 1, 2, or 3 amino acid modifications (e.g., a substitution, deletion, or addition); and/or a CDR3 that comprises the amino acid sequence of SEQ ID NO: 292, 296, 300, 304, 308, or 312 or the amino acid sequence of SEQ ID NO: 292, 296, 300, 304, 308, or 312 with 1, 2, or 3 amino acid modifications (e.g., a substitution, deletion, or addition); and a second VHH comprising a CDR1 that comprises the amino acid sequence of SEQ ID NO: 290, 294, 298, 302, 306, or 310, or the amino acid sequence of SEQ ID NO: 290, 294, 298, 302, 306, or 310 with 1, 2, or 3 amino acid modifications (e.g., a substitution, deletion, or addition); a CDR2 that comprises the amino acid sequence of SEQ ID NO: 291, 295, 299, 303, 307, or 311, or the amino acid sequence of SEQ ID NO: 291, 295, 299, 303, 307, or 311 with 1, 2, or 3 amino acid modifications (e.g., a substitution, deletion, or addition); and/or a CDR3 that comprises the amino acid sequence of SEQ ID NO: 292, 296, 300, 304, 308, or 312 or the amino acid sequence of SEQ ID NO: 292, 296, 300, 304, 308, or 312 with 1, 2, or 3 amino acid modifications (e.g., a substitution, deletion, or addition).

[0222] In some embodiments, the (VHH)₂ comprises a first VHH comprising a CDR1 that comprises the amino acid sequence of SEQ ID NO: 290, or the amino acid sequence of SEQ ID NO: 290 with 1, 2, or 3 amino acid modifications (e.g., a substitution, deletion, or addition); a CDR2 that comprises the amino acid sequence of SEQ ID NO: 291, or the amino acid sequence of SEQ ID NO: 291 with 1, 2, or 3 amino acid modifications (e.g., a substitution, deletion, or addition); and a CDR3 that comprises the amino acid sequence of SEQ ID NO: 292, or the amino acid sequence of SEQ ID NO: 292 with 1, 2, or 3 amino acid modifications (e.g., a substitution, deletion, or addition), operably connected (optionally via an amino acid linker) to a second VHH, wherein the second VHH comprises a CDR1 that comprises the amino acid sequence of SEQ ID NO: 290, or the amino acid sequence of SEQ ID NO: 290 with 1, 2, or 3 amino acid modifications (e.g., a substitution, deletion, or addition); a CDR2 that comprises the amino acid sequence of SEQ ID NO: 291, or the amino acid sequence of SEQ ID NO: 291 with 1, 2, or 3 amino acid modifications (e.g., a substitution, deletion, or addition); and a CDR3 that comprises the amino acid sequence of SEQ ID NO: 292, or the amino acid sequence of SEQ ID NO: 292 with 1, 2, or 3 amino acid modifications (e.g., a substitution, deletion, or addition).

[0223] In some embodiments, the (VHH)₂ comprises a first VHH that comprises a CDR1 that comprises the amino acid sequence of SEQ ID NO: 294, or the amino acid sequence of SEQ ID NO: 294 with 1, 2, or 3 amino acid modifications (e.g., a substitution, deletion, or addition); a CDR2 that comprises the amino acid sequence of SEQ ID NO: 295, or the amino acid sequence of SEQ ID NO: 295 with 1, 2, or 3 amino acid modifications (e.g., a substitution, deletion, or addition); and a CDR3 that comprises the amino acid sequence of SEQ ID NO: 296, or the amino acid sequence of SEQ ID NO: 296 with 1, 2, or 3 amino acid modifications (e.g., a substitution, deletion, or addition), operably connected (optionally via an amino acid linker) to a second VHH, wherein the second VHH comprises a CDR1 that comprises the amino acid sequence of SEQ ID NO: 294, or the amino acid sequence of SEQ ID NO: 294 with 1, 2, or 3 amino acid modifications (e.g., a substitution, deletion, or addition); a CDR2 that comprises the amino acid sequence of SEQ ID NO: 295, or the amino acid sequence of SEQ ID NO: 295 with 1, 2, or 3 amino acid modifications (e.g., a substitution, deletion, or addition); and a CDR3 that comprises the amino acid sequence of SEQ ID NO: 296, or the amino acid sequence of SEQ ID NO: 296 with 1, 2, or 3 amino acid modifications (e.g., a substitution, deletion, or addition).

[0224] In some embodiments, the (VHH)₂ comprises a first VHH that comprises a CDR1 that comprises the amino acid sequence of SEQ ID NO: 298, or the amino acid sequence of SEQ ID NO: 298 with 1, 2, or 3 amino acid modifications (e.g., a substitution, deletion, or addition); a CDR2 that comprises the amino acid sequence of SEQ ID NO: 299, or the amino acid sequence of SEQ ID NO: 299 with 1, 2, or 3 amino acid modifications (e.g., a substitution, deletion, or addition); and a CDR3 that comprises the amino acid sequence of SEQ ID NO: 300, or the amino acid sequence of SEQ ID NO: 300 with 1, 2, or 3 amino acid modifications (e.g., a substitution, deletion, or addition), operably connected (optionally via an amino acid linker) to a second VHH, wherein the second VHH comprises a CDR1 that comprises the amino acid sequence of SEQ ID NO: 298, or the amino acid sequence of SEQ ID NO: 298 with 1, 2, or 3 amino acid modifications (e.g., a substitution, deletion, or addition); a CDR2 that comprises the amino acid sequence of SEQ ID NO: 299, or the amino acid sequence of SEQ ID NO: 299 with 1, 2, or 3 amino acid modifications (e.g., a substitution, deletion, or addition); and a CDR3 that comprises the amino acid sequence of SEQ ID NO: 300, or the amino acid sequence of SEQ ID NO: 300 with 1, 2, or 3 amino acid modifications (e.g., a substitution, deletion, or addition).

[0225] In some embodiments, the (VHH)₂ comprises a first VHH that comprises a CDR1 that comprises the amino acid sequence of SEQ ID NO: 302, or the amino acid sequence of SEQ ID NO: 302 with 1, 2, or 3 amino acid modifications (e.g., a substitution, deletion, or addition); a CDR2 that comprises the amino acid sequence of SEQ ID NO: 303, or the amino acid sequence of SEQ ID NO: 303 with 1, 2, or 3 amino acid modifications (e.g., a substitution, deletion, or addition); and a CDR3 that comprises the amino acid sequence of SEQ ID NO: 304, or the amino acid sequence of SEQ ID NO: 304 with 1, 2, or 3 amino acid modifications (e.g., a substitution, deletion, or addition), operably connected (optionally via an amino acid linker) to a second VHH, wherein the second VHH comprises a comprising a VH CDR1 that comprises the amino acid sequence of SEQ ID NO: 302, or the amino acid sequence of SEQ ID NO: 302 with 1, 2, or 3 amino acid modifications (e.g., a substitution, deletion, or addition); a CDR2 that comprises the amino acid sequence of SEQ ID NO: 303, or the amino acid sequence of SEQ ID NO: 303 with 1, 2, or 3 amino acid modifications (e.g., a substitution, deletion, or addition); and a CDR3 that comprises the amino acid sequence of SEQ ID NO: 304, or the amino acid sequence of SEQ ID NO: 304 with 1, 2, or 3 amino acid modifications (e.g., a substitution, deletion, or addition).

[0226] In some embodiments, the (VHH)₂ comprises a first VHH that comprises a CDR1 that comprises the amino acid sequence of SEQ ID NO: 306, or the amino acid sequence of SEQ ID NO: 306 with 1, 2, or 3 amino acid modifications (e.g., a substitution, deletion, or addition); a CDR2 that comprises the amino acid sequence of SEQ ID NO: 307, or the amino acid sequence of SEQ ID NO: 307 with 1, 2, or 3 amino acid modifications (e.g., a substitution, deletion, or addition); and a CDR3 that comprises the amino acid sequence of SEQ ID NO: 308, or the amino acid sequence of SEQ ID NO: 308 with 1, 2, or 3 amino acid modifications (e.g., a substitution, deletion, or addition), operably connected (optionally via an amino acid linker) to a second VHH, wherein the second VHH comprises a comprising a CDR1 that comprises the amino acid sequence of SEQ ID NO: 306, or the amino acid sequence of SEQ ID NO: 306 with 1, 2, or 3 amino acid modifications (e.g., a substitution, deletion, or addition); a CDR2 that comprises the amino acid sequence of SEQ ID NO: 307, or the amino acid sequence of SEQ ID NO: 307 with 1, 2, or 3 amino acid modifications (e.g., a substitution, deletion, or addition); and a CDR3 that comprises the amino acid sequence of SEQ ID NO: 308, or the amino acid sequence of SEQ ID NO: 308 with 1, 2, or 3 amino acid modifications (e.g., a substitution, deletion, or addition).

[0227] In some embodiments, the (VHH)₂ comprises a first VHH that comprises a CDR1 that comprises the amino acid sequence of SEQ ID NO: 310, or the amino acid sequence of SEQ ID NO: 310 with 1, 2, or 3 amino acid modifications (e.g., a substitution, deletion, or addition); a CDR2 that comprises the amino acid sequence of SEQ ID NO: 311, or the amino acid sequence of SEQ ID NO: 311 with 1, 2, or 3 amino acid modifications (e.g., a substitution, deletion, or addition); and a CDR3 that comprises the amino acid sequence of SEQ ID NO: 312, or the amino acid sequence of SEQ ID NO: 312 with 1, 2, or 3 amino acid modifications (e.g., a substitution, deletion, or addition), operably connected (optionally via an amino acid linker) to a second VHH, wherein the second VHH comprises a CDR1 that comprises the amino acid sequence of SEQ ID NO: 310, or the amino acid sequence of SEQ ID NO: 310 with 1, 2, or 3 amino acid modifications (e.g., a substitution, deletion, or addition); a CDR2 that comprises the amino acid sequence of SEQ ID NO: 311, or the amino acid sequence of SEQ ID NO: 311 with 1, 2, or 3 amino acid modifications (e.g., a substitution, deletion, or addition); and a CDR3 that comprises the amino acid sequence of SEQ ID NO: 312, or the amino acid sequence of SEQ ID NO: 312 with 1, 2, or 3 amino acid modifications (e.g., a substitution, deletion, or addition).

[0228] In some embodiments, the (VHH)₂ comprises a first VHH that comprises an amino acid sequence at least 90%, 91%, 92%, 93%, 94%, 95%, 96%, 97%, 98%, 99%, or 100% identical to the amino acid sequence of SEQ ID NO: 293, 297, 301, 305, 309, or 313; and a second VHH that comprises an amino acid sequence at least 90%, 91%, 92%, 93%, 94%, 95%, 96%, 97%, 98%, 99%, or 100% identical to the amino acid sequence of SEQ ID NO: 293, 297, 301, 305, 309, or 313.

[0229] In some embodiments, the (VHH)₂ comprises a first VHH that comprises an amino acid sequence at least 90%, 91%, 92%, 93%, 94%, 95%, 96%, 97%, 98%, 99%, or 100% identical to the amino acid sequence of SEQ ID NO: 293; and a second VHH that comprises an amino acid sequence at least 90%, 91%, 92%, 93%, 94%, 95%, 96%, 97%, 98%, 99%, or 100% identical to the amino acid sequence of SEQ ID NO: 293.

[0230] In some embodiments, the (VHH)₂ comprises a first VHH that comprises an amino acid sequence at least 90%, 91%, 92%, 93%, 94%, 95%, 96%, 97%, 98%, 99%, or 100% identical to the amino acid sequence of SEQ ID NO: 297; and a second VHH that comprises an amino acid sequence at least 90%, 91%, 92%, 93%, 94%, 95%, 96%, 97%, 98%, 99%, or 100% identical to the amino acid sequence of SEQ ID NO: 297.

[0231] In some embodiments, the (VHH)₂ comprises a first VHH that comprises an amino acid sequence at least 90%, 91%, 92%, 93%, 94%, 95%, 96%, 97%, 98%, 99%, or 100% identical to the amino acid sequence of SEQ ID NO: 301; and a second VHH that comprises an amino acid sequence at least 90%, 91%, 92%, 93%, 94%, 95%, 96%, 97%, 98%, 99%, or 100% identical to the amino acid sequence of SEQ ID NO: 301.

[0232] In some embodiments, the (VHH)₂ comprises a first VHH that comprises an amino acid sequence at least 90%, 91%, 92%, 93%, 94%, 95%, 96%, 97%, 98%, 99%, or 100% identical to the amino acid sequence of SEQ ID NO: 305; and a second VHH that comprises an amino acid sequence at least 90%, 91%, 92%, 93%, 94%, 95%, 96%, 97%, 98%, 99%, or 100% identical to the amino acid sequence of SEQ ID NO: 305.

[0233] In some embodiments, the (VHH)₂ comprises a first VHH that comprises an amino acid sequence at least 90%, 91%, 92%, 93%, 94%, 95%, 96%, 97%, 98%, 99%, or 100% identical to the amino acid sequence of SEQ ID NO: 309; and a second VHH that comprises an amino acid sequence at least 90%, 91%, 92%, 93%, 94%, 95%, 96%, 97%, 98%, 99%, or 100% identical to the amino acid sequence of SEQ ID NO: 309.

[0234] In some embodiments, the (VHH)₂ comprises a first VHH that comprises an amino acid sequence at least 90%, 91%, 92%, 93%, 94%, 95%, 96%, 97%, 98%, 99%, or 100% identical to the amino acid sequence of SEQ ID NO: 313; and a second VHH that comprises an amino acid sequence at least 90%, 91%, 92%, 93%, 94%, 95%, 96%, 97%, 98%, 99%, or 100% identical to the amino acid sequence of SEQ ID NO: 313.

[0235] In some embodiments, the (VHH)₂ comprises an amino acid sequence at least 90%, 91%, 92%, 93%, 94%, 95%, 96%, 97%, 98%, 99%, or 100% identical to the amino acid sequence of SEQ ID NO: 314. In some embodiments, the (VHH)₂ comprises an amino acid sequence at least 90%, 91%, 92%, 93%, 94%, 95%, 96%, 97%, 98%, 99%, or 100% identical to the amino acid sequence of SEQ ID NO: 315. In some embodiments, the (VHH)₂ comprises an amino acid sequence at least 90%, 91%, 92%, 93%, 94%, 95%, 96%, 97%, 98%, 99%, or 100% identical to the amino acid sequence of SEQ ID NO: 316. In some embodiments, the (VHH)₂ comprises an amino acid sequence at least 90%, 91%, 92%, 93%, 94%, 95%, 96%, 97%, 98%, 99%, or 100% identical to the amino acid sequence of SEQ ID NO: 317. In some embodiments, the (VHH)₂ comprises an amino acid sequence at least 90%, 91%, 92%, 93%, 94%, 95%, 96%, 97%, 98%, 99%, or 100% identical to the amino acid sequence of SEQ ID NO: 318. In some embodiments, the (VHH)₂ comprises an amino acid sequence at least 90%, 91%, 92%, 93%, 94%, 95%, 96%, 97%, 98%, 99%, or 100% identical to the amino acid sequence of SEQ ID NO: 319.

[0236] In some embodiments, the anti-SYNGAP1 VHH is one described in Table 3.

[0237] The amino acid sequence of anti-SYNGAP1 VHHs is provided in Table 3 below.

TABLE 3
Amino Acid Sequence of Anti-SynGAP1 VHHs. The CDRs are defined according
to Kabat.

| Description | | SEQ ID NO | Amino Acid Sequence |
|---|---|---|---|
| FLX00152 | CDR1 | 290 | GFSFSNFP |
| | CDR2 | 291 | INQDGRNT |
| | CDR3 | 292 | QAIRTTTHEDS |
| | VHH | 293 | QVQLVESGGGLVQPGGSLRLSCAASGFSFSNFPMMWVR |
| | | | QAPGKGREWVADINQDGRNTYYADSVKGRFTISRDNAK |
| | | | TTVYLQMNNLNPEDTAVYYCQAIRTTTHFDSWGQGTQV |
| | | | TVSS |
| FLX00153 | CDR1 | 294 | GFTFSNYR |
| | CDR2 | 295 | IDRSGTYT |
| | CDR3 | 296 | AADRRLIVDLTPEVYDH |
| | VHH | 297 | QLQLVESGGGLVQPGESLRLSCAASGFTFSNYRMYWVR |
| | | | MAPGKGLEWVSDIDRSGTYTYYADSVKGRFAISRDNAK |
| | | | NTVYLQMNSLKPEDTAVYYCAADRRLIVDLTPEVYDHW |
| | | | GQGTQVTVSS |
| FLX00154 | CDR1 | 298 | GFIFSSYQ |
| | CDR2 | 299 | INTGGWNT |
| | CDR3 | 300 | AADRWMVAKIVGGDLDFDS |
| | VHH | 301 | QVQLVESGGGLVQPGGSLRLSCAASGFIFSSYQMAWVR |
| | | | QAPGKGLEWVADINTGGWNTYYADSVKGRFTISRDNAK |
| | | | NTLYLEMNSLKPEDTAVYYCAADRWMVAKIVGGDLDFD |
| | | | SWGQGTQVTVSS |
| FLX00155 | CDR1 | 302 | GFAFGSYD |
| | CDR2 | 303 | ITPGGGGT |
| | CDR3 | 304 | YYCAKNFYGNGG |
| | VHH | 305 | QVQLVESGGGLVQPGGSLRLSCAASGFAFGSYDMSWVR |
| | | | QAPGQGPEWVSAITPGGGGTFYAYYSDSVKGRFAISRD |
| | | | NAKNTLTLQMNSLKPDDTAMYYCAKNFYGNGGRGHGTQ |
| | | | VTVSS |
| FLX00156 | CDR1 | 306 | GFTFGTHA |
| | CDR2 | 307 | ISSGGGGT |
| | CDR3 | 308 | NSPSNIANDN |
| | VHH | 309 | QVQLVESGGGLVQPGGSLRLACAASGFTFGTHAMHWVR |
| | | | WAPGKGFEWVSTISSGGGGTRYADSVKGRFTISRDNAK |
| | | | NTVYLQMDNLKPEDTAVYYCNSPSNIANDNWGQGTQVT |
| | | | VSS |
| FLX00157 | CDR1 | 310 | ERTFGHYA |
| | CDR2 | 311 | ISWKGGTT |
| | CDR3 | 312 | AARNTMSGSMSSSAYPY |
| | VHH | 313 | QVQLVESGGGLVQAGASLRLSCAASERTFGHYAMGWFR |
| | | | QAPGKEREFVATISWKGGTTGYAHSVKGRFTISRDSAK |
| | | | NMVYLQMNSLKPEDTAVYYCAARNTMSGSMSSSAYPYW |
| | | | GQGTQVTVSS |

[0238] The amino acid sequence of anti-SYNGAP1 VHH₂'s is provided in Table 4 below.

TABLE 4
Amino Acid Sequence of Anti-SynGAP1 VHH2S

| | SEQ ID | |
|---|---|---|
| Description | NO: | Amino Acid Sequence |
| FLX00152 | 314 | QVQLVESGGGLVQPGGSLRLSCAASGFSFSNFPMMWVRQAPGKGRE |
| | | WVADINQDGRNTYYADSVKGRFTISRDNAKTTVYLQMNNLNPEDTA |
| | | VYYCQAIRTTTHFDSWGQGTQVTVSSGGGGSGGGGSGGGGSGGGGS |
| | | QVQLVESGGGLVQPGGSLRLSCAASGFSFSNFPMMWVRQAPGKGRE |
| | | WVADINQDGRNTYYADSVKGRFTISRDNAKTTVYLQMNNLNPEDTA |
| | | VYYCQAIRTTTHFDSWGQGTQVTVSS |
| FLX00153 | 315 | QLQLVESGGGLVQPGESLRLSCAASGFTFSNYRMYWVRMAPGKGLE |
| | | WVSDIDRSGTYTYYADSVKGRFAISRDNAKNTVYLQMNSLKPEDTA |
| | | VYYCAADRRLIVDLTPEVYDHWGQGTQVTVSSGGGGSGGGGSGGGG |
| | | SGGGGSQLQLVESGGGLVQPGESLRLSCAASGFTESNYRMYWVRMA |
| | | PGKGLEWVSDIDRSGTYTYYADSVKGRFAISRDNAKNTVYLQMNSL |
| | | KPEDTAVYYCAADRRLIVDLTPEVYDHWGQGTQVTVSS |
| FLX00154 | 316 | QVQLVESGGGLVQPGGSLRLSCAASGFIFSSYQMAWVRQAPGKGLE |
| | | WVADINTGGWNTYYADSVKGRFTISRDNAKNTLYLEMNSLKPEDTA |
| | | VYYCAADRWMVAKIVGGDLDFDSWGQGTQVTVSSGGGGSGGGGSGG |
| | | GGSGGGGSQVQLVESGGGLVQPGGSLRLSCAASGFIFSSYQMAWVR |
| | | QAPGKGLEWVADINTGGWNTYYADSVKGRFTISRDNAKNTLYLEMN |
| | | SLKPEDTAVYYCAADRWMVAKIVGGDLDFDSWGQGTQVTVSS |
| FLX00155 | 317 | QVQLVESGGGLVQPGGSLRLSCAASGFAFGSYDMSWVRQAPGQGPE |
| | | WVSAITPGGGGTFYAYYSDSVKGRFAISRDNAKNTLTLQMNSLKPD |
| | | DTAMYYCAKNFYGNGGRGHGTQVTVSSGGGGSGGGGSGGGGSGGGG |
| | | SQVQLVESGGGLVQPGGSLRLSCAASGFAFGSYDMSWVRQAPGQGP |
| | | EWVSAITPGGGGTFYAYYSDSVKGRFAISRDNAKNTLTLQMNSLKP |
| | | DDTAMYYCAKNFYGNGGRGHGTQVTVSS |
| FLX00156 | 318 | QVQLVESGGGLVQPGGSLRLACAASGFTFGTHAMHWVRWAPGKGFE |
| | | WVSTISSGGGGTRYADSVKGRFTISRDNAKNTVYLQMDNLKPEDTA |
| | | VYYCNSPSNIANDNWGQGTQVTVSSGGGGSGGGGSGGGGSGGGGSQ |
| | | VQLVESGGGLVQPGGSLRLACAASGFTFGTHAMHWVRWAPGKGFEW |
| | | VSTISSGGGGTRYADSVKGRFTISRDNAKNTVYLQMDNLKPEDTAV |
| | | YYCNSPSNIANDNWGQGTQVTVSS |
| FLX00157 | 319 | QVQLVESGGGLVQAGASLRLSCAASERTFGHYAMGWERQAPGKERE |
| | | FVATISWKGGTTGYAHSVKGRFTISRDSAKNMVYLQMNSLKPEDTA |
| | | VYYCAARNTMSGSMSSSAYPYWGQGTQVTVSSGGGGSGGGGSGGGG |
| | | SGGGGSQVQLVESGGGLVQAGASLRLSCAASERTFGHYAMGWERQA |
| | | PGKEREFVATISWKGGTTGYAHSVKGRFTISRDSAKNMVYLQMNSL |
| | | KPEDTAVYYCAARNTMSGSMSSSAYPYWGQGTQVTVSS |

### 5.3.3 Orientation and Linkers

[0239] In some embodiments, the effector domain is N-terminal of the targeting domain in the fusion protein. In some embodiments, the targeting domain is N-terminal of the effector domain in the fusion protein. In some embodiments, the effector domain is operably connected (directly or indirectly) to the C terminus of the targeting domain. In some embodiments, the effector domain is operably connected (directly or indirectly) to the N terminus of the targeting domain. In some embodiments, the effector domain is directly operably connected to the C terminus of the targeting domain. In some embodiments, the effector domain is directly operably connected to the N terminus of the targeting domain.

[0240] In some embodiments, the effector domain is indirectly operably connected to the C terminus of the targeting domain. In some embodiments, the effector domain is indirectly operably connected to the N terminus of the targeting domain. One or more amino acid sequences comprising e.g., a linker, or encoding one or more polypeptides may be positioned between the effector moiety and the targeting moiety. In some embodiments, the effector domain is indirectly operably connected to the C terminus of the targeting domain through a peptide linker. In some embodiments, the effector domain is indirectly operably connected to the N terminus of the targeting domain through a peptide linker.

[0241] Each component of the fusion protein described herein can be directly linked to the other to indirectly linked to the other via a peptide linker. In some embodiments, the linker is one or any combination of a cleavable linker, a non-cleavable linker, a peptide linker, a flexible linker, a rigid linker, a helical linker, or a non-helical linker. In some embodiments, the linker is a peptide linker. In some embodiments, the linker is a peptide linker that comprises glycine or serine, or both glycine and serine amino acid residues. In some embodiments, the peptide linker comprises from or from about 2-25, 5-25, 10-25, 15-25, 20-25, 2-20, 5-20, 10-20, 15-20, 2-15, 5-15, 10-15, 2-10, or 5-10 amino acids. In some embodiments, the linker is a peptide linker that consists of glycine or serine, or both glycine and serine amino acid residues. In some embodiments, the peptide linker consists of from or from about 2-25, 5-25, 10-25, 15-25, 20-25, 2-20, 5-20, 10-20, 15-20, 2-15, 5-15, 10-15, 2-10, or 5-10 amino acids. In some embodiments, the peptide linker comprises at least 2, 3, 4, 5, 6, 7, 8, 9, 10, 11, 12, 13, 14, 15, 16, 17, 18, 19, 20, 21, 22, 23, 24, 25, 26, 27, 28, 29, or 30 amino acid residues. In some embodiments, the linker is at least 11 amino acids in length. In some embodiments, the linker is at least 15 amino acids in length. In some embodiments, the linker is 10, 11, 12, 13, 14, 15, 16, 17, 18, 19, 20, 21, 22, 23, 24, 25, 26, 27, 28, 29, or 30 amino acid residues in length.

[0242] In some embodiments, the linker is a glycine/serine linker, e.g., a peptide linker substantially consisting of the amino acids glycine and serine. In some embodiments, the linker is a glycine/serine/proline linker, e.g., a peptide linker substantially consisting of the amino acids glycine, serine, and proline.

[0243] In some embodiments, the amino acid sequence of the linker comprises the amino acid sequence of any one of SEQ ID NOS: 375-384 or 402-519, or the amino acid sequence of any one of SEQ ID NOS: 375-384 or 402-519 comprising 1, 2, or 3 amino acid modifications (e.g., a substitution, deletion, or addition). In some embodiments, the amino acid sequence of the linker consists of the amino acid sequence of any one of SEQ ID NOS: 375-384 or 402-519, or the amino acid sequence of any one of SEQ ID NOS: 375-384 or 402-519 comprising 1, 2, or 3 amino acid modifications (e.g., a substitution, deletion, or addition).

[0244] In some embodiments, the amino acid sequence of the linker comprises the amino acid sequence of any one of SEQ ID NOS: 375-384, or the amino acid sequence of any one of SEQ ID NOS: 375-384 comprising 1, 2, or 3 amino acid modifications (e.g., a substitution, deletion, or addition). In some embodiments, the amino acid sequence of the linker consists of the amino acid sequence of any one of SEQ ID NOS: 375-384, or the amino acid sequence of any one of SEQ ID NOS: 375-384 comprising 1, 2, or 3 amino acid modifications (e.g., a substitution, deletion, or addition).

[0245] The amino acid sequence of exemplary linkers for use in any one or more of the fusion proteins described herein is provided in Table 5 below.

TABLE 5
Amino Acid Sequence of Exemplary Linkers

| | SEQ |
|---|---|
| Amino Acid Sequence | ID NO |
| GGGGSGGGGSGGGGSGGGGSGGGGS | 375 |
| GGGGSGGGGSGGGGSGGGGS | 376 |
| GGGGSGGGGSGGGGS | 377 |
| GGGGSGGGGS | 378 |
| GGGGS | 379 |
| SGGGGSGGGGSGGGGS | 380 |
| SGGGGSGGGGSGGGG | 381 |
| SGGGGSGGGG | 382 |
| SGGGG | 383 |
| GGSGG | 384 |
| AHFKISGEKRPSTDPGKKAKNPKKKKKKDP | 402 |
| AHRAKKMSKTHA | 403 |
| ASPEYVNLPINGNG | 404 |
| CTKRPRW | 405 |
| DKAKRVSRNKSEKKRR | 406 |
| EELRLKEELLKGIYA | 407 |
| EEQLRRRKNSRLNNTG | 408 |
| EVLKVIRTGKRKKKAWKRMVTKVC | 409 |
| HHHHHHHHHHHHQPH | 410 |
| HKKKHPDASVNFSEFSK | 411 |
| HKRTKKNLS | 412 |
| IINGRKLKLKKSRRRSSQTSNNSFTSRRS | 413 |
| KAEQERRK | 414 |
| KEKRKRREELFIEQKKRK | 415 |
| KKGKDEWFSRGKKP | 416 |
| KKGPSVQKRKKTNLS | 417 |
| KKKTVINDLLHYKKEK | 418 |
| KKNGGKGKNKPSAKIKK | 419 |
| KKPKWDDFKKKKK | 420 |
| KKRKKDNLS | 421 |
| KKRRKRRRK | 422 |
| KKRRRRARK | 423 |
| KKSKRGR | 424 |
| KKSRKRGS | 425 |
| KKSTALSRELGKIMRRR | 426 |
| KKSYQDPEIIAHSRPRK | 427 |
| KKTGKNRKLKSKRVKTR | 428 |
| KKVSIAGQSGKLWRWKR | 429 |
| KKYENVVIKRSPRKRGRPRK | 430 |
| KNKKRK | 431 |
| KPKKKR | 432 |
| KRAMKDDSHGNSTSPKRRK | 433 |
| KRANSNLVAAYEKAKKK | 434 |
| KRASEDTTSGSPPKKSSAGPKR | 435 |
| KRFKRRWMVRKMKTKK | 436 |
| KRGLNSSFETSPKKVK | 437 |
| KRGNSSIGPNDLSKRKQRKK | 438 |
| KRIHSVSLSQSQIDPSKKVKRAK | 439 |
| KRKGKLKNKGSKRKK | 440 |
| KRRRRRRREKRKR | 441 |
| KRSNDRTYSPEEEKQRRA | 442 |
| KRTVATNGDASGAHRAKKMSK | 443 |
| KRVYNKGEDEQEHLPKGKKR | 444 |
| KSGKAPRRRAVSMDNSNK | 445 |
| KVNFLDMSLDDIIIYKELE | 446 |
| KVQHRIAKKTTRRRR | 447 |
| LSPSLSPL | 448 |
| MDSLLMNRRKFLYQFKNVRWAKGRRETYLC | 449 |
| MPQNEYIELHRKRYGYRLDYHEKKRKKESREAHERSKKAKK | 450 |
| MIGLKAKLYHK | |
| MVQLRPRASR | 451 |
| NNKLLAKRRKGGASPKDDPMDDIK | 452 |
| NYKRPMDGTYGPPAKRHEGE | 453 |
| PDTKRAKLDSSETTMVKKK | 454 |
| PEKRTKI | 455 |
| PGGRGKKK | 456 |
| PGKMDKGEHRQERRDRPY | 457 |
| PKKGDKYDKTD | 458 |
| PKKKSRK | 459 |
| PKKNKPE | 460 |
| PKKRAKV | 461 |
| PKPKKLKVE | 462 |
| PKRGRGR | 463 |
| PKRRLVDDA | 464 |
| PKRRRTY | 465 |
| PLEKRR | 466 |
| PLRKAKR | 467 |
| PPAKRKCIF | 468 |
| PPARRRRL | 469 |
| PPKKKRKV | 470 |
| PPNKRMKVKH | 471 |
| PPRIYPQLPSAPT | 472 |
| PQRSPFPKSSVKR | 473 |
| PRPRKVPR | 474 |
| PRRRVQRKR | 475 |
| PRRVRLK | 476 |
| PSRKRPR | 477 |
| PSSKKRKV | 478 |
| PTKKRVK | 479 |
| QRPGPYDRP | 480 |
| RGKGGKGLGKGGAKRHRK | 481 |
| RKAGKGGGGHKTTKKRSAKDEKVP | 482 |
| RKIKLKRAK | 483 |
| RKIKRKRAK | 484 |
| RKKEAPGPREELRSRGR | 485 |
| RKKRKGK | 486 |
| RKKRRQRRR | 487 |
| RKKSIPLSIKNLKRKHKRKKNKITR | 488 |
| RKLVKPKNTKMKTKLRTNPY | 489 |
| RKRLILSDKGQLDWKK | 490 |
| RKRLKSK | 491 |
| RKRRVRDNM | 492 |
| RKRSPKDKKEKDLDGAGKRRKT | 493 |
| RKRTPRVDGQTGENDMNKRRRK | 494 |
| RLPVRRRRRR | 495 |
| RLRFRKPKSK | 496 |
| RQQRKR | 497 |
| RRDLNSSFETSPKKVK | 498 |
| RRDRAKLR | 499 |
| RRGDGRRR | 500 |
| RRGRKRKAEKQ | 501 |
| RRKKRR | 502 |
| RRKRSKSEDMDSVESKRRR | 503 |
| RRKRSR | 504 |
| RRPKGKTLQKRKPK | 505 |
| RRRGFERFGPDNMGRKRK | 506 |
| RRRGKNKVAAQNCRK | 507 |
| RRRKRRNLS | 508 |
| RRRQKQKGGASRRR | 509 |
| RRRREGPRARRRR | 510 |
| RRTIRLKLVYDKCDRSCKIQKKNRNKCQYCRFHKCLSVGMS | 511 |
| HNAIREGRMPRSEKAKLKAE | |
| RRVPQRKEVSRCRKCRK | 512 |
| RVGGRRQAVECIEDLLNEPGQPLDLSCKRPRP | 513 |
| RVVKLRIAP | 514 |
| RVVRRR | 515 |
| SKRKTKISRKTR | 516 |
| SYVKTVPNRTRTYIKL | 517 |
| TGKNEAKKRKIA | 518 |
| TLSPASSPSSVSCPVIPASTDESPGSALNI | 519 |

### 5.3.3.1 Conditional Constructs

[0246] Also described herein are constructs that comprise a targeting domain (e.g., a VHH, (VHH)₂) bound to an effector domain (e.g., an effector domain that comprises a catalytic domain of an deubiquitinase, or an effector domain that comprises a deubiquitinase). In some embodiments, the association of the targeting domain and the effector domain is mediated by binding of a first agent (e.g., a small molecule, protein, or peptide) attached to the targeting domain and a second agent (e.g., a small, molecule, protein, or peptide) attached to the effector domain. For example, in one embodiment, the targeting domain may be attached to a first agent that specifically binds to a second agent that is attached to the effector domain. In some embodiments, specific binding of the first agent to the second agent is mediated by addition of a third agent (e.g., a small molecule).

[0247] For example, a conditional construct includes an KBP/FRB-based dimerization switch, e.g., as described in US20170081411 (the entire contents of which are incorporated by reference herein), can be utilized herein. FKBP12 (FKBP or FK506 binding protein) is an abundant cytoplasmic protein that serves as the initial intracellular target for the natural product immunosuppressive drug, rapamycin. Rapamycin binds to FKBP and to the large PI3K homolog FRAP (RAFT, mTOR), thereby acting to dimerize these molecules. In some embodiments, an FKBP/FRAP based switch, also referred to herein as an FKBP/FRB based switch, can utilize a heterodimerization molecule, e.g., rapamycin or a rapamycin analog. FRB is a 93 amino acid portion of FRAP, that is sufficient for binding the FKBP-rapamycin complex (Chen, J., Zheng, X. F., Brown, E. J. & Schreiber, S. L. (1995) Identification of an 11-kDa FKBP12-rapamycin-binding domain within the 289-kDa FKBP12-rapamycin-associated protein and characterization of a critical serine residue. Proc Natl Acad Sci USA 92: 4947-51), the entire contents of which is incorporated by reference herein. For example, the targeting domain can be attached to FKBP and the effector domain attached to FRB. Thereby, the association of the targeting domain and the effector domain is mediated by rapamycin and only takes place in the presence of rapamycin.

[0248] Exemplary conditional activation systems that can be used here include, but are not limited to those described in US20170081411; Lajoie M J, et al. Designed protein logic to target cells with precise combinations of surface antigens. Science. 2020 Sep. 25; 369(6511):1637-1643. doi: 10.1126/science.aba6527. Epub 2020 Aug. 20. PMID: 32820060; Farrants H, et al. Chemogenetic Control of Nanobodies. Nat Methods. 2020 March; 17(3):279-282. doi: 10.1038/s41592-020-0746-7. Epub 2020 Feb. 17. PMID: 32066961; and US20170081411, the entire contents of each of which is incorporated by reference herein for all purposes.

### 5.3.4 Exemplary Fusion Proteins

[0249] Exemplary fusion proteins are described below. Exemplary fusion proteins of the present disclosure include, but are not limited to, those described below. In some embodiments, the fusion protein comprises an effector domain comprising a catalytic domain of a cysteine protease deubiquitinase, or a functional fragment or functional variant thereof; and a targeting domain comprising a targeting moiety that specifically binds a cytosolic protein, wherein the cytosolic protein is CDKL5, ATP7B, STXBP1, SYNGAP1, GRN, JAG1, DEPDC5, TSC2, TSC1, KIF1A, DNM1, SHANK3, DMD, RP1, TTN, DYNC1H1, TRIO, USP9X, PYDC2, CSTB, or PCBD1.

[0250] In some embodiments, the fusion protein comprises an effector domain comprising a catalytic domain of a metalloprotease deubiquitinase, or a functional fragment or functional variant thereof; and a targeting domain comprising a targeting moiety that specifically binds a cytosolic protein, wherein the cytosolic protein is CDKL5, ATP7B, STXBP1, SYNGAP1, GRN, JAG1, DEPDC5, TSC2, TSC1, KIF1A, DNM1, SHANK3, DMD, RP1, TTN, DYNC1H1, TRIO, or USP9X, PYDC2, CSTB, or PCBD1.

[0251] In some embodiments, the fusion protein comprises an effector domain comprising a catalytic domain of a deubiquitinase, or a functional fragment or functional variant thereof, wherein the deubiquitinase is a ubiquitin-specific protease (USP), a ubiquitin C-terminal hydrolase (UCH), a Machado-Josephin domain protease (MJD), an ovarian tumour protease (OTU), a MINDY protease, or a ZUFSP protease; and a targeting domain comprising a targeting moiety that specifically binds a cytosolic protein, wherein the cytosolic protein is CDKL5, ATP7B, STXBP1, SYNGAP1, GRN, JAG1, DEPDC5, TSC2, TSC1, KIF1A, DNM1, SHANK3, DMD, RP1, TTN, DYNC1H1, TRIO, USP9X, PYDC2, CSTB, or PCBD1.

[0252] In one embodiment, the fusion protein comprises an effector domain comprising a catalytic domain of a deubiquitinase, or a functional fragment or functional variant thereof, wherein the deubiquitinase is USP1, USP2, USP3, USP4, USP5, USP6, USP7, USP8, USP9X, USP9Y, USP10, USP11, USP12, USP13, USP14, USP15, USP16, USP17, USP17L2, USP17L3, USP17L4, USP17L5, USP17L7, USP17L8, USP18, USP19, USP20, USP21, USP22, USP23, USP24, USP25, USP26, USP27X, USP28, USP29, USP30, USP31, USP32, USP33, USP34, USP35, USP36, USP37, USP38, USP39, USP40, USP41, USP42, USP43, USP44, USP45, USP46, BAP1, UCHL1, UCHL3, UCHL5, ATXN3 ATXN3L, OTUB1, OTUB2 MINDY1, MINDY2, MINDY3, MINDY4, or ZUP1; and a targeting domain comprising a targeting moiety that specifically binds a cytosolic protein, wherein the cytosolic protein is CDKL5, ATP7B, STXBP1, SYNGAP1, GRN, JAG1, DEPDC5, TSC2, TSC1, KIF1A, DNM1, SHANK3, DMD, RP1, TTN, DYNC1H1, TRIO, USP9X, PYDC2, CSTB, or PCBD1.

[0253] In one embodiment, the fusion protein comprises an effector domain comprising a catalytic domain of a deubiquitinase, or a functional fragment or functional variant thereof, wherein the deubiquitinase is described in Table 1; and a targeting domain comprising a targeting moiety that specifically binds a cytosolic protein, wherein the cytosolic protein is CDKL5, ATP7B, STXBP1, SYNGAP1, GRN, JAG1, DEPDC5, TSC2, TSC1, KIF1A, DNM1, SHANK3, DMD, RP1, TTN, DYNC1H1, TRIO, USP9X, PYDC2, CSTB, or PCBD1.

[0254] In one embodiment, the fusion protein comprises an effector domain comprising a catalytic domain of a deubiquitinase, or a functional fragment or functional variant thereof, wherein the catalytic domain is described in Table 1; and a targeting domain comprising a targeting moiety that specifically binds a cytosolic protein, wherein the cytosolic protein is CDKL5, ATP7B, STXBP1, SYNGAP1, GRN, JAG1, DEPDC5, TSC2, TSC1, KIF1A, DNM1, SHANK3, DMD, RP1, TTN, DYNC1H1, TRIO, USP9X, PYDC2, CSTB, or PCBD1.

[0255] In one embodiment, the fusion protein comprises an effector domain comprising a catalytic domain of a deubiquitinase, or a functional fragment or functional variant thereof, wherein the deubiquitinase comprises an amino acid sequence at least 80%, 81%, 82%, 83%, 84%, 85%, 86%, 87%, 88%, 89%, 90%, 91%, 92%, 93%, 94%, 95%, 96%, 97%, 98%, 99%, or 100% identical to the amino acid sequence of any one of SEQ ID NOS: 1-112; and a targeting domain comprising a targeting moiety that specifically binds a cytosolic protein, wherein the cytosolic protein is CDKL5, ATP7B, STXBP1, SYNGAP1, GRN, JAG1, DEPDC5, TSC2, TSC1, KIF1A, DNM1, SHANK3, DMD, RP1, TTN, DYNC1H1, TRIO, USP9X, PYDC2, CSTB, or PCBD1.

[0256] In one embodiment, the fusion protein comprises an effector domain comprising a catalytic domain of a deubiquitinase, or a functional fragment or functional variant thereof, wherein the catalytic domain comprises an amino acid sequence at least 80%, 81%, 82%, 83%, 84%, 85%, 86%, 87%, 88%, 89%, 90%, 91%, 92%, 93%, 94%, 95%, 96%, 97%, 98%, 99%, or 100% identical to the amino acid sequence of any one of SEQ ID NOS: 113-220 or 286; and a targeting domain comprising a targeting moiety that specifically binds a cytosolic protein, wherein the cytosolic protein is CDKL5, ATP7B, STXBP1, SYNGAP1, GRN, JAG1, DEPDC5, TSC2, TSC1, KIF1A, DNM1, SHANK3, DMD, RP1, TTN, DYNC1H1, TRIO, USP9X, PYDC2, CSTB, or PCBD1.

[0257] In one embodiment, the fusion protein comprises an effector domain comprising a catalytic domain of a deubiquitinase, or a functional fragment or functional variant thereof, wherein the deubiquitinase comprises an amino acid sequence at least 80%, 81%, 82%, 83%, 84%, 85%, 86%, 87%, 88%, 89%, 90%, 91%, 92%, 93%, 94%, 95%, 96%, 97%, 98%, 99%, or 100% identical to the amino acid sequence of any one of SEQ ID NOS: 1-112; and a targeting domain comprising a targeting moiety that specifically binds a cytosolic protein, wherein the cytosolic protein comprises an amino acid sequence at least 90%, 91%, 92%, 93%, 94%, 95%, 96%, 97%, 98%, 99%, or 100% identical to the amino acid sequence of any one of SEQ ID NOS: 221-238 or 287-289.

[0258] In one embodiment, the fusion protein comprises an effector domain comprising a catalytic domain of a deubiquitinase, or a functional fragment or functional variant thereof, wherein the catalytic domain comprises an amino acid sequence at least 80%, 81%, 82%, 83%, 84%, 85%, 86%, 87%, 88%, 89%, 90%, 91%, 92%, 93%, 94%, 95%, 96%, 97%, 98%, 99%, or 100% identical to the amino acid sequence of any one of SEQ ID NOS: 113-220 or 286; and a targeting domain comprising a targeting moiety that specifically binds a cytosolic protein, wherein the cytosolic protein comprises an amino acid sequence at least 90%, 91%, 92%, 93%, 94%, 95%, 96%, 97%, 98%, 99%, or 100% identical to the amino acid sequence of any one of SEQ ID NOS: 221-238 or 287-289.

[0259] The amino acid sequence of exemplary SYNGAP1 targeting fusion proteins are provided in Table 6 below.

TABLE 6
Amino acid sequence of exemplary SYNGAP1 targeting enDub fusion proteins

| Description | SEQ ID NO: | Amino Acid Sequence |
|---|---|---|
| FLX00152-Cezanne | 320 | QVQLVESGGGLVQPGGSLRLSCAASGFSFSNFPMMWVR |
| | | QAPGKGREWVADINQDGRNTYYADSVKGRFTISRDNAK |
| | | TTVYLQMNNLNPEDTAVYYCQAIRTTTHEDSWGQGTQV |
| | | TVSSPPSFSEGSGGSRTPEKGFSDREPTRPPRPILQRQ |
| | | DDIVQEKRLSRGISHASSSIVSLARSHVSSNGGGGGSN |
| | | EHPLEMPICAFQLPDLTVYNEDERSFIERDLIEQSMLV |
| | | ALEQAGRLNWWVSVDPTSQRLLPLATTGDGNCLLHAAS |
| | | LGMWGFHDRDLMLRKALYALMEKGVEKEALKRRWRWQQ |
| | | TQQNKESGLVYTEDEWQKEWNELIKLASSEPRMHLGTN |
| | | GANCGGVESSEEPVYESLEEFHVFVLAHVLRRPIVVVA |
| | | DTMLRDSGGEAFAPIPEGGIYLPLEVPASQCHRSPLVL |
| | | AYDQAHFSALVSMEQKENTKEQAVIPLTDSEYKLLPLH |
| | | FAVDPGKGWEWGKDDSDNVRLASVILSLEVKLHLLHSY |
| | | MNVKWIPLSSDAQAPLAQ |
| FLX00153-Cezanne | 321 | QLQLVESGGGLVQPGESLRLSCAASGFTESNYRMYWVR |
| | | MAPGKGLEWVSDIDRSGTYTYYADSVKGRFAISRDNAK |
| | | NTVYLQMNSLKPEDTAVYYCAADRRLIVDLTPEVYDHW |
| | | GQGTQVTVSSPPSFSEGSGGSRTPEKGESDREPTRPPR |
| | | PILQRQDDIVQEKRLSRGISHASSSIVSLARSHVSSNG |
| | | GGGGSNEHPLEMPICAFQLPDLTVYNEDERSFIERDLI |
| | | EQSMLVALEQAGRLNWWVSVDPTSQRLLPLATTGDGNC |
| | | LLHAASLGMWGFHDRDLMLRKALYALMEKGVEKEALKR |
| | | RWRWQQTQQNKESGLVYTEDEWQKEWNELIKLASSEPR |
| | | MHLGTNGANCGGVESSEEPVYESLEEFHVFVLAHVLRR |
| | | PIVVVADTMLRDSGGEAFAPIPEGGIYLPLEVPASQCH |
| | | RSPLVLAYDQAHFSALVSMEQKENTKEQAVIPLTDSEY |
| | | KLLPLHFAVDPGKGWEWGKDDSDNVRLASVILSLEVKL |
| | | HLLHSYMNVKWIPLSSDAQAPLAQ |
| FLX00154-Cezanne | 322 | QVQLVESGGGLVQPGGSLRLSCAASGFIFSSYQMAWVR |
| | | QAPGKGLEWVADINTGGWNTYYADSVKGRFTISRDNAK |
| | | NTLYLEMNSLKPEDTAVYYCAADRWMVAKIVGGDLDED |
| | | SWGQGTQVTVSSPPSFSEGSGGSRTPEKGESDREPTRP |
| | | PRPILQRQDDIVQEKRLSRGISHASSSIVSLARSHVSS |
| | | NGGGGGSNEHPLEMPICAFQLPDLTVYNEDERSFIERD |
| | | LIEQSMLVALEQAGRLNWWVSVDPTSQRLLPLATTGDG |
| | | NCLLHAASLGMWGFHDRDLMLRKALYALMEKGVEKEAL |
| | | KRRWRWQQTQQNKESGLVYTEDEWQKEWNELIKLASSE |
| | | PRMHLGTNGANCGGVESSEEPVYESLEEFHVEVLAHVL |
| | | RRPIVVVADTMLRDSGGEAFAPIPEGGIYLPLEVPASQ |
| | | CHRSPLVLAYDQAHFSALVSMEQKENTKEQAVIPLTDS |
| | | EYKLLPLHFAVDPGKGWEWGKDDSDNVRLASVILSLEV |
| | | KLHLLHSYMNVKWIPLSSDAQAPLAQ |
| FLX00155-Cezanne | 323 | QVQLVESGGGLVQPGGSLRLSCAASGFAFGSYDMSWVR |
| | | QAPGQGPEWVSAITPGGGGTFYAYYSDSVKGRFAISRD |
| | | NAKNTLTLQMNSLKPDDTAMYYCAKNFYGNGGRGHGTQ |
| | | VTVSSPPSFSEGSGGSRTPEKGFSDREPTRPPRPILQR |
| | | QDDIVQEKRLSRGISHASSSIVSLARSHVSSNGGGGGS |
| | | NEHPLEMPICAFQLPDLTVYNEDERSFIERDLIEQSML |
| | | VALEQAGRLNWWVSVDPTSQRLLPLATTGDGNCLLHAA |
| | | SLGMWGFHDRDLMLRKALYALMEKGVEKEALKRRWRWQ |
| | | QTQQNKESGLVYTEDEWQKEWNELIKLASSEPRMHLGT |
| | | NGANCGGVESSEEPVYESLEEFHVFVLAHVLRRPIVVV |
| | | ADTMLRDSGGEAFAPIPEGGIYLPLEVPASQCHRSPLV |
| | | LAYDQAHFSALVSMEQKENTKEQAVIPLTDSEYKLLPL |
| | | HFAVDPGKGWEWGKDDSDNVRLASVILSLEVKLHLLHS |
| | | YMNVKWIPLSSDAQAPLAQ |
| FLX00156-Cezanne | 324 | QVQLVESGGGLVQPGGSLRLACAASGFTFGTHAMHWVR |
| | | WAPGKGFEWVSTISSGGGGTRYADSVKGRFTISRDNAK |
| | | NTVYLQMDNLKPEDTAVYYCNSPSNIANDNWGQGTQVT |
| | | VSSPPSFSEGSGGSRTPEKGFSDREPTRPPRPILQRQD |
| | | DIVQEKRLSRGISHASSSIVSLARSHVSSNGGGGGSNE |
| | | HPLEMPICAFQLPDLTVYNEDERSFIERDLIEQSMLVA |
| | | LEQAGRLNWWVSVDPTSQRLLPLATTGDGNCLLHAASL |
| | | GMWGFHDRDLMLRKALYALMEKGVEKEALKRRWRWQQT |
| | | QQNKESGLVYTEDEWQKEWNELIKLASSEPRMHLGING |
| | | ANCGGVESSEEPVYESLEEFHVFVLAHVLRRPIVVVAD |
| | | TMLRDSGGEAFAPIPFGGIYLPLEVPASQCHRSPLVLA |
| | | YDQAHFSALVSMEQKENTKEQAVIPLTDSEYKLLPLHE |
| | | AVDPGKGWEWGKDDSDNVRLASVILSLEVKLHLLHSYM |
| | | NVKWIPLSSDAQAPLAQ |
| FLX00157-Cezanne | 325 | QVQLVESGGGLVQAGASLRLSCAASERTFGHYAMGWER |
| | | QAPGKEREFVATISWKGGTTGYAHSVKGRFTISRDSAK |
| | | NMVYLQMNSLKPEDTAVYYCAARNTMSGSMSSSAYPYW |
| | | GQGTQVTVSSPPSFSEGSGGSRTPEKGFSDREPTRPPR |
| | | PILQRQDDIVQEKRLSRGISHASSSIVSLARSHVSSNG |
| | | GGGGSNEHPLEMPICAFQLPDLTVYNEDERSFIERDLI |
| | | EQSMLVALEQAGRLNWWVSVDPTSQRLLPLATTGDGNC |
| | | LLHAASLGMWGFHDRDLMLRKALYALMEKGVEKEALKR |
| | | RWRWQQTQQNKESGLVYTEDEWQKEWNELIKLASSEPR |
| | | MHLGTNGANCGGVESSEEPVYESLEEFHVEVLAHVLRR |
| | | PIVVVADTMLRDSGGEAFAPIPFGGIYLPLEVPASQCH |
| | | RSPLVLAYDQAHFSALVSMEQKENTKEQAVIPLTDSEY |
| | | KLLPLHFAVDPGKGWEWGKDDSDNVRLASVILSLEVKL |
| | | HLLHSYMNVKWIPLSSDAQAPLAQ |
| FLX00152-GSSSS | 326 | QVQLVESGGGLVQPGGSLRLSCAASGFSFSNFPMMWVR |
| linker-Cezanne | | QAPGKGREWVADINQDGRNTYYADSVKGRFTISRDNAK |
| | | TTVYLQMNNLNPEDTAVYYCQAIRTTTHEDSWGQGTQV |
| | | TVSSGSSSSPPSFSEGSGGSRTPEKGFSDREPTRPPRP |
| | | ILQRQDDIVQEKRLSRGISHASSSIVSLARSHVSSNGG |
| | | GGGSNEHPLEMPICAFQLPDLTVYNEDERSFIERDLIE |
| | | QSMLVALEQAGRLNWWVSVDPTSQRLLPLATTGDGNCL |
| | | LHAASLGMWGFHDRDLMLRKALYALMEKGVEKEALKRR |
| | | WRWQQTQQNKESGLVYTEDEWQKEWNELIKLASSEPRM |
| | | HLGTNGANCGGVESSEEPVYESLEEFHVFVLAHVLRRP |
| | | IVVVADTMLRDSGGEAFAPIPFGGIYLPLEVPASQCHR |
| | | SPLVLAYDQAHFSALVSMEQKENTKEQAVIPLTDSEYK |
| | | LLPLHFAVDPGKGWEWGKDDSDNVRLASVILSLEVKLH |
| | | LLHSYMNVKWIPLSSDAQAPLAQ |
| FLX00153-GSSSS | 327 | QLQLVESGGGLVQPGESLRLSCAASGFTFSNYRMYWVR |
| linker-Cezanne | | MAPGKGLEWVSDIDRSGTYTYYADSVKGRFAISRDNAK |
| | | NTVYLQMNSLKPEDTAVYYCAADRRLIVDLTPEVYDHW |
| | | GQGTQVTVSSGSSSSPPSFSEGSGGSRTPEKGFSDREP |
| | | TRPPRPILQRQDDIVQEKRLSRGISHASSSIVSLARSH |
| | | VSSNGGGGGSNEHPLEMPICAFQLPDLTVYNEDERSFI |
| | | ERDLIEQSMLVALEQAGRLNWWVSVDPTSQRLLPLATT |
| | | GDGNCLLHAASLGMWGFHDRDLMLRKALYALMEKGVEK |
| | | EALKRRWRWQQTQQNKESGLVYTEDEWQKEWNELIKLA |
| | | SSEPRMHLGTNGANCGGVESSEEPVYESLEEFHVEVLA |
| | | HVLRRPIVVVADTMLRDSGGEAFAPIPEGGIYLPLEVP |
| | | ASQCHRSPLVLAYDQAHFSALVSMEQKENTKEQAVIPL |
| | | TDSEYKLLPLHFAVDPGKGWEWGKDDSDNVRLASVILS |
| | | LEVKLHLLHSYMNVKWIPLSSDAQAPLAQ |
| FLX00154-GSSSS | 328 | QVQLVESGGGLVQPGGSLRLSCAASGFIFSSYQMAWVR |
| linker-Cezanne | | QAPGKGLEWVADINTGGWNTYYADSVKGRFTISRDNAK |
| | | NTLYLEMNSLKPEDTAVYYCAADRWMVAKIVGGDLDED |
| | | SWGQGTQVTVSSGSSSSPPSFSEGSGGSRTPEKGFSDR |
| | | EPTRPPRPILQRQDDIVQEKRLSRGISHASSSIVSLAR |
| | | SHVSSNGGGGGSNEHPLEMPICAFQLPDLTVYNEDERS |
| | | FIERDLIEQSMLVALEQAGRLNWWVSVDPTSQRLLPLA |
| | | TTGDGNCLLHAASLGMWGFHDRDLMLRKALYALMEKGV |
| | | EKEALKRRWRWQQTQQNKESGLVYTEDEWQKEWNELIK |
| | | LASSEPRMHLGTNGANCGGVESSEEPVYESLEEFHVEV |
| | | LAHVLRRPIVVVADTMLRDSGGEAFAPIPEGGIYLPLE |
| | | VPASQCHRSPLVLAYDQAHFSALVSMEQKENTKEQAVI |
| | | PLTDSEYKLLPLHFAVDPGKGWEWGKDDSDNVRLASVI |
| | | LSLEVKLHLLHSYMNVKWIPLSSDAQAPLAQ |
| FLX00155-GSSSS | 329 | QVQLVESGGGLVQPGGSLRLSCAASGFAFGSYDMSWVR |
| linker-Cezanne | | QAPGQGPEWVSAITPGGGGTFYAYYSDSVKGRFAISRD |
| | | NAKNTLTLQMNSLKPDDTAMYYCAKNFYGNGGRGHGTQ |
| | | VTVSSGSSSSPPSFSEGSGGSRTPEKGESDREPTRPPR |
| | | PILQRQDDIVQEKRLSRGISHASSSIVSLARSHVSSNG |
| | | GGGGSNEHPLEMPICAFQLPDLTVYNEDERSFIERDLI |
| | | EQSMLVALEQAGRLNWWVSVDPTSQRLLPLATTGDGNC |
| | | LLHAASLGMWGFHDRDLMLRKALYALMEKGVEKEALKR |
| | | RWRWQQTQQNKESGLVYTEDEWQKEWNELIKLASSEPR |
| | | MHLGTNGANCGGVESSEEPVYESLEEFHVEVLAHVLRR |
| | | PIVVVADTMLRDSGGEAFAPIPEGGIYLPLEVPASQCH |
| | | RSPLVLAYDQAHFSALVSMEQKENTKEQAVIPLTDSEY |
| | | KLLPLHFAVDPGKGWEWGKDDSDNVRLASVILSLEVKL |
| | | HLLHSYMNVKWIPLSSDAQAPLAQ |
| FLX00156-GSSSS | 330 | QVQLVESGGGLVQPGGSLRLACAASGFTFGTHAMHWVR |
| linker-Cezanne | | WAPGKGFEWVSTISSGGGGTRYADSVKGRFTISRDNAK |
| | | NTVYLQMDNLKPEDTAVYYCNSPSNIANDNWGQGTQVT |
| | | VSSGSSSSPPSFSEGSGGSRTPEKGFSDREPTRPPRPI |
| | | LQRQDDIVQEKRLSRGISHASSSIVSLARSHVSSNGGG |
| | | GGSNEHPLEMPICAFQLPDLTVYNEDERSFIERDLIEQ |
| | | SMLVALEQAGRLNWWVSVDPTSQRLLPLATTGDGNCLL |
| | | HAASLGMWGFHDRDLMLRKALYALMEKGVEKEALKRRW |
| | | RWQQTQQNKESGLVYTEDEWQKEWNELIKLASSEPRMH |
| | | LGTNGANCGGVESSEEPVYESLEEFHVFVLAHVLRRPI |
| | | VVVADTMLRDSGGEAFAPIPEGGIYLPLEVPASQCHRS |
| | | PLVLAYDQAHFSALVSMEQKENTKEQAVIPLTDSEYKL |
| | | LPLHFAVDPGKGWEWGKDDSDNVRLASVILSLEVKLHL |
| | | LHSYMNVKWIPLSSDAQAPLAQ |
| FLX00157-GSSSS | 331 | QVQLVESGGGLVQAGASLRLSCAASERTFGHYAMGWER |
| linker-Cezanne | | QAPGKEREFVATISWKGGTTGYAHSVKGRFTISRDSAK |
| | | NMVYLQMNSLKPEDTAVYYCAARNTMSGSMSSSAYPYW |
| | | GQGTQVTVSSGSSSSPPSFSEGSGGSRTPEKGESDREP |
| | | TRPPRPILQRQDDIVQEKRLSRGISHASSSIVSLARSH |
| | | VSSNGGGGGSNEHPLEMPICAFQLPDLTVYNEDERSFI |
| | | ERDLIEQSMLVALEQAGRLNWWVSVDPTSQRLLPLATT |
| | | GDGNCLLHAASLGMWGFHDRDLMLRKALYALMEKGVEK |
| | | EALKRRWRWQQTQQNKESGLVYTEDEWQKEWNELIKLA |
| | | SSEPRMHLGTNGANCGGVESSEEPVYESLEEFHVEVLA |
| | | HVLRRPIVVVADTMLRDSGGEAFAPIPEGGIYLPLEVP |
| | | ASQCHRSPLVLAYDQAHFSALVSMEQKENTKEQAVIPL |
| | | TDSEYKLLPLHFAVDPGKGWEWGKDDSDNVRLASVILS |
| | | LEVKLHLLHSYMNVKWIPLSSDAQAPLAQ |
| FLX00152-(GSSSS)2 | 332 | QVQLVESGGGLVQPGGSLRLSCAASGFSFSNFPMMWVR |
| linker-Cezanne | | QAPGKGREWVADINQDGRNTYYADSVKGRFTISRDNAK |
| | | TTVYLQMNNLNPEDTAVYYCQAIRTTTHEDSWGQGTQV |
| | | TVSSGSSSSGSSSSPPSESEGSGGSRTPEKGESDREPT |
| | | RPPRPILQRQDDIVQEKRLSRGISHASSSIVSLARSHV |
| | | SSNGGGGGSNEHPLEMPICAFQLPDLTVYNEDERSFIE |
| | | RDLIEQSMLVALEQAGRLNWWVSVDPTSQRLLPLATTG |
| | | DGNCLLHAASLGMWGFHDRDLMLRKALYALMEKGVEKE |
| | | ALKRRWRWQQTQQNKESGLVYTEDEWQKEWNELIKLAS |
| | | SEPRMHLGTNGANCGGVESSEEPVYESLEEFHVEVLAH |
| | | VLRRPIVVVADTMLRDSGGEAFAPIPEGGIYLPLEVPA |
| | | SQCHRSPLVLAYDQAHFSALVSMEQKENTKEQAVIPLT |
| | | DSEYKLLPLHFAVDPGKGWEWGKDDSDNVRLASVILSL |
| | | EVKLHLLHSYMNVKWIPLSSDAQAPLAQ |
| FLX00153-(GSSSS)2 | 333 | QLQLVESGGGLVQPGESLRLSCAASGFTFSNYRMYWVR |
| linker-Cezanne | | MAPGKGLEWVSDIDRSGTYTYYADSVKGRFAISRDNAK |
| | | NTVYLQMNSLKPEDTAVYYCAADRRLIVDLTPEVYDHW |
| | | GQGTQVTVSSGSSSSGSSSSPPSFSEGSGGSRTPEKGF |
| | | SDREPTRPPRPILQRQDDIVQEKRLSRGISHASSSIVS |
| | | LARSHVSSNGGGGGSNEHPLEMPICAFQLPDLTVYNED |
| | | FRSFIERDLIEQSMLVALEQAGRLNWWVSVDPTSQRLL |
| | | PLATTGDGNCLLHAASLGMWGFHDRDLMLRKALYALME |
| | | KGVEKEALKRRWRWQQTQQNKESGLVYTEDEWQKEWNE |
| | | LIKLASSEPRMHLGTNGANCGGVESSEEPVYESLEEFH |
| | | VFVLAHVLRRPIVVVADTMLRDSGGEAFAPIPEGGIYL |
| | | PLEVPASQCHRSPLVLAYDQAHFSALVSMEQKENTKEQ |
| | | AVIPLTDSEYKLLPLHFAVDPGKGWEWGKDDSDNVRLA |
| | | SVILSLEVKLHLLHSYMNVKWIPLSSDAQAPLAQ |
| FLX00154-(GSSSS)2 | 334 | QVQLVESGGGLVQPGGSLRLSCAASGFIFSSYQMAWVR |
| linker-Cezanne | | QAPGKGLEWVADINTGGWNTYYADSVKGRFTISRDNAK |
| | | NTLYLEMNSLKPEDTAVYYCAADRWMVAKIVGGDLDED |
| | | SWGQGTQVTVSSGSSSSGSSSSPPSFSEGSGGSRTPEK |
| | | GFSDREPTRPPRPILQRQDDIVQEKRLSRGISHASSSI |
| | | VSLARSHVSSNGGGGGSNEHPLEMPICAFQLPDLTVYN |
| | | EDERSFIERDLIEQSMLVALEQAGRLNWWVSVDPTSQR |
| | | LLPLATTGDGNCLLHAASLGMWGFHDRDLMLRKALYAL |
| | | MEKGVEKEALKRRWRWQQTQQNKESGLVYTEDEWQKEW |
| | | NELIKLASSEPRMHLGTNGANCGGVESSEEPVYESLEE |
| | | FHVFVLAHVLRRPIVVVADTMLRDSGGEAFAPIPEGGI |
| | | YLPLEVPASQCHRSPLVLAYDQAHFSALVSMEQKENTK |
| | | EQAVIPLTDSEYKLLPLHFAVDPGKGWEWGKDDSDNVR |
| | | LASVILSLEVKLHLLHSYMNVKWIPLSSDAQAPLAQ |
| FLX00155-(GSSSS)2 | 335 | QVQLVESGGGLVQPGGSLRLSCAASGFAFGSYDMSWVR |
| linker-Cezanne | | QAPGQGPEWVSAITPGGGGTFYAYYSDSVKGRFAISRD |
| | | NAKNTLTLQMNSLKPDDTAMYYCAKNFYGNGGRGHGTQ |
| | | VTVSSGSSSSGSSSSPPSFSEGSGGSRTPEKGESDREP |
| | | TRPPRPILQRQDDIVQEKRLSRGISHASSSIVSLARSH |
| | | VSSNGGGGGSNEHPLEMPICAFQLPDLTVYNEDERSFI |
| | | ERDLIEQSMLVALEQAGRLNWWVSVDPTSQRLLPLATT |
| | | GDGNCLLHAASLGMWGFHDRDLMLRKALYALMEKGVEK |
| | | EALKRRWRWQQTQQNKESGLVYTEDEWQKEWNELIKLA |
| | | SSEPRMHLGTNGANCGGVESSEEPVYESLEEFHVEVLA |
| | | HVLRRPIVVVADTMLRDSGGEAFAPIPEGGIYLPLEVP |
| | | ASQCHRSPLVLAYDQAHESALVSMEQKENTKEQAVIPL |
| | | TDSEYKLLPLHFAVDPGKGWEWGKDDSDNVRLASVILS |
| | | LEVKLHLLHSYMNVKWIPLSSDAQAPLAQ |
| FLX00156-(GSSSS)2 | 336 | QVQLVESGGGLVQPGGSLRLACAASGFTFGTHAMHWVR |
| linker-Cezanne | | WAPGKGFEWVSTISSGGGGTRYADSVKGRFTISRDNAK |
| | | NTVYLQMDNLKPEDTAVYYCNSPSNIANDNWGQGTQVT |
| | | VSSGSSSSGSSSSPPSFSEGSGGSRTPEKGESDREPTR |
| | | PPRPILQRQDDIVQEKRLSRGISHASSSIVSLARSHVS |
| | | SNGGGGGSNEHPLEMPICAFQLPDLTVYNEDERSFIER |
| | | DLIEQSMLVALEQAGRLNWWVSVDPTSQRLLPLATTGD |
| | | GNCLLHAASLGMWGFHDRDLMLRKALYALMEKGVEKEA |
| | | LKRRWRWQQTQQNKESGLVYTEDEWQKEWNELIKLASS |
| | | EPRMHLGTNGANCGGVESSEEPVYESLEEFHVEVLAHV |
| | | LRRPIVVVADTMLRDSGGEAFAPIPEGGIYLPLEVPAS |
| | | QCHRSPLVLAYDQAHFSALVSMEQKENTKEQAVIPLTD |
| | | SEYKLLPLHFAVDPGKGWEWGKDDSDNVRLASVILSLE |
| | | VKLHLLHSYMNVKWIPLSSDAQAPLAQ |
| FLX00157-(GSSSS)2 | 337 | QVQLVESGGGLVQAGASLRLSCAASERTFGHYAMGWER |
| linker-Cezanne | | QAPGKEREFVATISWKGGTTGYAHSVKGRFTISRDSAK |
| | | NMVYLQMNSLKPEDTAVYYCAARNTMSGSMSSSAYPYW |
| | | GQGTQVTVSSGSSSSGSSSSPPSFSEGSGGSRTPEKGF |
| | | SDREPTRPPRPILQRQDDIVQEKRLSRGISHASSSIVS |
| | | LARSHVSSNGGGGGSNEHPLEMPICAFQLPDLTVYNED |
| | | FRSFIERDLIEQSMLVALEQAGRLNWWVSVDPTSQRLL |
| | | PLATTGDGNCLLHAASLGMWGFHDRDLMLRKALYALME |
| | | KGVEKEALKRRWRWQQTQQNKESGLVYTEDEWQKEWNE |
| | | LIKLASSEPRMHLGTNGANCGGVESSEEPVYESLEEFH |
| | | VFVLAHVLRRPIVVVADTMLRDSGGEAFAPIPEGGIYL |
| | | PLEVPASQCHRSPLVLAYDQAHESALVSMEQKENTKEQ |
| | | AVIPLTDSEYKLLPLHFAVDPGKGWEWGKDDSDNVRLA |
| | | SVILSLEVKLHLLHSYMNVKWIPLSSDAQAPLAQ |
| FLX00152-(GSSSS)3 | 338 | QVQLVESGGGLVQPGGSLRLSCAASGFSFSNFPMMWVR |
| linker-Cezanne | | QAPGKGREWVADINQDGRNTYYADSVKGRFTISRDNAK |
| | | TTVYLQMNNLNPEDTAVYYCQAIRTTTHEDSWGQGTQV |
| | | TVSSGSSSSGSSSSGSSSSPPSFSEGSGGSRTPEKGFS |
| | | DREPTRPPRPILQRQDDIVQEKRLSRGISHASSSIVSL |
| | | ARSHVSSNGGGGGSNEHPLEMPICAFQLPDLTVYNEDE |
| | | RSFIERDLIEQSMLVALEQAGRLNWWVSVDPTSQRLLP |
| | | LATTGDGNCLLHAASLGMWGFHDRDLMLRKALYALMEK |
| | | GVEKEALKRRWRWQQTQQNKESGLVYTEDEWQKEWNEL |
| | | IKLASSEPRMHLGTNGANCGGVESSEEPVYESLEEFHV |
| | | FVLAHVLRRPIVVVADTMLRDSGGEAFAPIPFGGIYLP |
| | | LEVPASQCHRSPLVLAYDQAHFSALVSMEQKENTKEQA |
| | | VIPLTDSEYKLLPLHFAVDPGKGWEWGKDDSDNVRLAS |
| | | VILSLEVKLHLLHSYMNVKWIPLSSDAQAPLAQ |
| FLX00153-(GSSSS)3 | 339 | QLQLVESGGGLVQPGESLRLSCAASGFTESNYRMYWVR |
| linker-Cezanne | | MAPGKGLEWVSDIDRSGTYTYYADSVKGRFAISRDNAK |
| | | NTVYLQMNSLKPEDTAVYYCAADRRLIVDLTPEVYDHW |
| | | GQGTQVTVSSGSSSSGSSSSGSSSSPPSFSEGSGGSRT |
| | | PEKGESDREPTRPPRPILQRQDDIVQEKRLSRGISHAS |
| | | SSIVSLARSHVSSNGGGGGSNEHPLEMPICAFQLPDLT |
| | | VYNEDERSFIERDLIEQSMLVALEQAGRLNWWVSVDPT |
| | | SQRLLPLATTGDGNCLLHAASLGMWGFHDRDLMLRKAL |
| | | YALMEKGVEKEALKRRWRWQQTQQNKESGLVYTEDEWQ |
| | | KEWNELIKLASSEPRMHLGTNGANCGGVESSEEPVYES |
| | | LEEFHVFVLAHVLRRPIVVVADTMLRDSGGEAFAPIPE |
| | | GGIYLPLEVPASQCHRSPLVLAYDQAHFSALVSMEQKE |
| | | NTKEQAVIPLTDSEYKLLPLHFAVDPGKGWEWGKDDSD |
| | | NVRLASVILSLEVKLHLLHSYMNVKWIPLSSDAQAPLA |
| | | Q |
| FLX00154-(GSSSS)3 | 340 | QVQLVESGGGLVQPGGSLRLSCAASGFIFSSYQMAWVR |
| linker-Cezanne | | QAPGKGLEWVADINTGGWNTYYADSVKGRFTISRDNAK |
| | | NTLYLEMNSLKPEDTAVYYCAADRWMVAKIVGGDLDED |
| | | SWGQGTQVTVSSGSSSSGSSSSGSSSSPPSFSEGSGGS |
| | | RTPEKGFSDREPTRPPRPILQRQDDIVQEKRLSRGISH |
| | | ASSSIVSLARSHVSSNGGGGGSNEHPLEMPICAFQLPD |
| | | LTVYNEDFRSFIERDLIEQSMLVALEQAGRLNWWVSVD |
| | | PTSQRLLPLATTGDGNCLLHAASLGMWGFHDRDLMLRK |
| | | ALYALMEKGVEKEALKRRWRWQQTQQNKESGLVYTEDE |
| | | WQKEWNELIKLASSEPRMHLGTNGANCGGVESSEEPVY |
| | | ESLEEFHVFVLAHVLRRPIVVVADTMLRDSGGEAFAPI |
| | | PFGGIYLPLEVPASQCHRSPLVLAYDQAHFSALVSMEQ |
| | | KENTKEQAVIPLTDSEYKLLPLHFAVDPGKGWEWGKDD |
| | | SDNVRLASVILSLEVKLHLLHSYMNVKWIPLSSDAQAP |
| | | LAQ |
| FLX00155-(GSSSS)3 | 341 | QVQLVESGGGLVQPGGSLRLSCAASGFAFGSYDMSWVR |
| linker-Cezanne | | QAPGQGPEWVSAITPGGGGTFYAYYSDSVKGRFAISRD |
| | | NAKNTLTLQMNSLKPDDTAMYYCAKNFYGNGGRGHGTQ |
| | | VTVSSGSSSSGSSSSGSSSSPPSFSEGSGGSRTPEKGF |
| | | SDREPTRPPRPILQRQDDIVQEKRLSRGISHASSSIVS |
| | | LARSHVSSNGGGGGSNEHPLEMPICAFQLPDLTVYNED |
| | | FRSFIERDLIEQSMLVALEQAGRLNWWVSVDPTSQRLL |
| | | PLATTGDGNCLLHAASLGMWGFHDRDLMLRKALYALME |
| | | KGVEKEALKRRWRWQQTQQNKESGLVYTEDEWQKEWNE |
| | | LIKLASSEPRMHLGTNGANCGGVESSEEPVYESLEEFH |
| | | VFVLAHVLRRPIVVVADTMLRDSGGEAFAPIPEGGIYL |
| | | PLEVPASQCHRSPLVLAYDQAHFSALVSMEQKENTKEQ |
| | | AVIPLTDSEYKLLPLHFAVDPGKGWEWGKDDSDNVRLA |
| | | SVILSLEVKLHLLHSYMNVKWIPLSSDAQAPLAQ |
| FLX00156-(GSSSS)3 | 342 | QVQLVESGGGLVQPGGSLRLACAASGFTFGTHAMHWVR |
| linker-Cezanne | | WAPGKGFEWVSTISSGGGGTRYADSVKGRFTISRDNAK |
| | | NTVYLQMDNLKPEDTAVYYCNSPSNIANDNWGQGTQVT |
| | | VSSGSSSSGSSSSGSSSSPPSFSEGSGGSRTPEKGESD |
| | | REPTRPPRPILQRQDDIVQEKRLSRGISHASSSIVSLA |
| | | RSHVSSNGGGGGSNEHPLEMPICAFQLPDLTVYNEDER |
| | | SFIERDLIEQSMLVALEQAGRLNWWVSVDPTSQRLLPL |
| | | ATTGDGNCLLHAASLGMWGFHDRDLMLRKALYALMEKG |
| | | VEKEALKRRWRWQQTQQNKESGLVYTEDEWQKEWNELI |
| | | KLASSEPRMHLGTNGANCGGVESSEEPVYESLEEFHVE |
| | | VLAHVLRRPIVVVADTMLRDSGGEAFAPIPEGGIYLPL |
| | | EVPASQCHRSPLVLAYDQAHESALVSMEQKENTKEQAV |
| | | IPLTDSEYKLLPLHFAVDPGKGWEWGKDDSDNVRLASV |
| | | ILSLEVKLHLLHSYMNVKWIPLSSDAQAPLAQ |
| FLX00157-(GSSSS)3 | 343 | QVQLVESGGGLVQAGASLRLSCAASERTFGHYAMGWER |
| linker-Cezanne | | QAPGKEREFVATISWKGGTTGYAHSVKGRFTISRDSAK |
| | | NMVYLQMNSLKPEDTAVYYCAARNTMSGSMSSSAYPYW |
| | | GQGTQVTVSSGSSSSGSSSSGSSSSPPSFSEGSGGSRT |
| | | PEKGESDREPTRPPRPILQRQDDIVQEKRLSRGISHAS |
| | | SSIVSLARSHVSSNGGGGGSNEHPLEMPICAFQLPDLT |
| | | VYNEDERSFIERDLIEQSMLVALEQAGRLNWWVSVDPT |
| | | SQRLLPLATTGDGNCLLHAASLGMWGFHDRDLMLRKAL |
| | | YALMEKGVEKEALKRRWRWQQTQQNKESGLVYTEDEWQ |
| | | KEWNELIKLASSEPRMHLGTNGANCGGVESSEEPVYES |
| | | LEEFHVFVLAHVLRRPIVVVADTMLRDSGGEAFAPIPE |
| | | GGIYLPLEVPASQCHRSPLVLAYDQAHESALVSMEQKE |
| | | NTKEQAVIPLTDSEYKLLPLHFAVDPGKGWEWGKDDSD |
| | | NVRLASVILSLEVKLHLLHSYMNVKWIPLSSDAQAPLA |
| | | Q |
| FLX00152 VHH₂- | 344 | QVQLVESGGGLVQPGGSLRLSCAASGFSFSNFPMMWVR |
| Cezanne | | QAPGKGREWVADINQDGRNTYYADSVKGRFTISRDNAK |
| | | TTVYLQMNNLNPEDTAVYYCQAIRTTTHEDSWGQGTQV |
| | | TVSSGGGGSGGGGSGGGGSGGGGSQVQLVESGGGLVQP |
| | | GGSLRLSCAASGFSFSNFPMMWVRQAPGKGREWVADIN |
| | | QDGRNTYYADSVKGRFTISRDNAKTTVYLQMNNLNPED |
| | | TAVYYCQAIRTTTHEDSWGQGTQVTVSSPPSFSEGSGG |
| | | SRTPEKGFSDREPTRPPRPILQRQDDIVQEKRLSRGIS |
| | | HASSSIVSLARSHVSSNGGGGGSNEHPLEMPICAFQLP |
| | | DLTVYNEDERSFIERDLIEQSMLVALEQAGRLNWWVSV |
| | | DPTSQRLLPLATTGDGNCLLHAASLGMWGFHDRDLMLR |
| | | KALYALMEKGVEKEALKRRWRWQQTQQNKESGLVYTED |
| | | EWQKEWNELIKLASSEPRMHLGTNGANCGGVESSEEPV |
| | | YESLEEFHVFVLAHVLRRPIVVVADTMLRDSGGEAFAP |
| | | IPFGGIYLPLEVPASQCHRSPLVLAYDQAHESALVSME |
| | | QKENTKEQAVIPLTDSEYKLLPLHFAVDPGKGWEWGKD |
| | | DSDNVRLASVILSLEVKLHLLHSYMNVKWIPLSSDAQA |
| | | PLAQ |
| FLX00153 VHH₂- | 345 | QLQLVESGGGLVQPGESLRLSCAASGFTFSNYRMYWVR |
| Cezanne | | MAPGKGLEWVSDIDRSGTYTYYADSVKGRFAISRDNAK |
| | | NTVYLQMNSLKPEDTAVYYCAADRRLIVDLTPEVYDHW |
| | | GQGTQVTVSSGGGGSGGGGSGGGGSGGGGSQLQLVESG |
| | | GGLVQPGESLRLSCAASGFTESNYRMYWVRMAPGKGLE |
| | | WVSDIDRSGTYTYYADSVKGRFAISRDNAKNTVYLQMN |
| | | SLKPEDTAVYYCAADRRLIVDLTPEVYDHWGQGTQVTV |
| | | SSPPSFSEGSGGSRTPEKGESDREPTRPPRPILQRQDD |
| | | IVQEKRLSRGISHASSSIVSLARSHVSSNGGGGGSNEH |
| | | PLEMPICAFQLPDLTVYNEDERSFIERDLIEQSMLVAL |
| | | EQAGRLNWWVSVDPTSQRLLPLATTGDGNCLLHAASLG |
| | | MWGFHDRDLMLRKALYALMEKGVEKEALKRRWRWQQTQ |
| | | QNKESGLVYTEDEWQKEWNELIKLASSEPRMHLGTNGA |
| | | NCGGVESSEEPVYESLEEFHVFVLAHVLRRPIVVVADT |
| | | MLRDSGGEAFAPIPEGGIYLPLEVPASQCHRSPLVLAY |
| | | DQAHFSALVSMEQKENTKEQAVIPLTDSEYKLLPLHFA |
| | | VDPGKGWEWGKDDSDNVRLASVILSLEVKLHLLHSYMN |
| | | VKWIPLSSDAQAPLAQ |
| FLX00154 VHH₂- | 346 | QVQLVESGGGLVQPGGSLRLSCAASGFIFSSYQMAWVR |
| Cezanne | | QAPGKGLEWVADINTGGWNTYYADSVKGRFTISRDNAK |
| | | NTLYLEMNSLKPEDTAVYYCAADRWMVAKIVGGDLDED |
| | | SWGQGTQVTVSSGGGGSGGGGSGGGGSGGGGSQVQLVE |
| | | SGGGLVQPGGSLRLSCAASGFIFSSYQMAWVRQAPGKG |
| | | LEWVADINTGGWNTYYADSVKGRFTISRDNAKNTLYLE |
| | | MNSLKPEDTAVYYCAADRWMVAKIVGGDLDEDSWGQGT |
| | | QVTVSSPPSFSEGSGGSRTPEKGFSDREPTRPPRPILQ |
| | | RQDDIVQEKRLSRGISHASSSIVSLARSHVSSNGGGGG |
| | | SNEHPLEMPICAFQLPDLTVYNEDERSFIERDLIEQSM |
| | | LVALEQAGRLNWWVSVDPTSQRLLPLATTGDGNCLLHA |
| | | ASLGMWGFHDRDLMLRKALYALMEKGVEKEALKRRWRW |
| | | QQTQQNKESGLVYTEDEWQKEWNELIKLASSEPRMHLG |
| | | TNGANCGGVESSEEPVYESLEEFHVFVLAHVLRRPIVV |
| | | VADTMLRDSGGEAFAPIPFGGIYLPLEVPASQCHRSPL |
| | | VLAYDQAHFSALVSMEQKENTKEQAVIPLTDSEYKLLP |
| | | LHFAVDPGKGWEWGKDDSDNVRLASVILSLEVKLHLLH |
| | | SYMNVKWIPLSSDAQAPLAQ |
| FLX00155 VHH₂- | 347 | QVQLVESGGGLVQPGGSLRLSCAASGFAFGSYDMSWVR |
| Cezanne | | QAPGQGPEWVSAITPGGGGTFYAYYSDSVKGRFAISRD |
| | | NAKNTLTLQMNSLKPDDTAMYYCAKNFYGNGGRGHGTQ |
| | | VTVSSGGGGSGGGGSGGGGSGGGGSQVQLVESGGGLVQ |
| | | PGGSLRLSCAASGFAFGSYDMSWVRQAPGQGPEWVSAI |
| | | TPGGGGTFYAYYSDSVKGRFAISRDNAKNTLTLQMNSL |
| | | KPDDTAMYYCAKNFYGNGGRGHGTQVTVSSPPSFSEGS |
| | | GGSRTPEKGFSDREPTRPPRPILQRQDDIVQEKRLSRG |
| | | ISHASSSIVSLARSHVSSNGGGGGSNEHPLEMPICAFQ |
| | | LPDLTVYNEDERSFIERDLIEQSMLVALEQAGRLNWWV |
| | | SVDPTSQRLLPLATTGDGNCLLHAASLGMWGFHDRDLM |
| | | LRKALYALMEKGVEKEALKRRWRWQQTQQNKESGLVYT |
| | | EDEWQKEWNELIKLASSEPRMHLGTNGANCGGVESSEE |
| | | PVYESLEEFHVFVLAHVLRRPIVVVADTMLRDSGGEAF |
| | | APIPEGGIYLPLEVPASQCHRSPLVLAYDQAHFSALVS |
| | | MEQKENTKEQAVIPLTDSEYKLLPLHFAVDPGKGWEWG |
| | | KDDSDNVRLASVILSLEVKLHLLHSYMNVKWIPLSSDA |
| | | QAPLAQ |
| FLX00156 VHH₂- | 348 | QVQLVESGGGLVQPGGSLRLACAASGFTFGTHAMHWVR |
| Cezanne | | WAPGKGFEWVSTISSGGGGTRYADSVKGRFTISRDNAK |
| | | NTVYLQMDNLKPEDTAVYYCNSPSNIANDNWGQGTQVT |
| | | VSSGGGGSGGGGSGGGGSGGGGSQVQLVESGGGLVQPG |
| | | GSLRLACAASGFTFGTHAMHWVRWAPGKGFEWVSTISS |
| | | GGGGTRYADSVKGRFTISRDNAKNTVYLQMDNLKPEDT |
| | | AVYYCNSPSNIANDNWGQGTQVTVSSPPSFSEGSGGSR |
| | | TPEKGFSDREPTRPPRPILQRQDDIVQEKRLSRGISHA |
| | | SSSIVSLARSHVSSNGGGGGSNEHPLEMPICAFQLPDL |
| | | TVYNEDERSFIERDLIEQSMLVALEQAGRLNWWVSVDP |
| | | TSQRLLPLATTGDGNCLLHAASLGMWGFHDRDLMLRKA |
| | | LYALMEKGVEKEALKRRWRWQQTQQNKESGLVYTEDEW |
| | | QKEWNELIKLASSEPRMHLGTNGANCGGVESSEEPVYE |
| | | SLEEFHVFVLAHVLRRPIVVVADTMLRDSGGEAFAPIP |
| | | FGGIYLPLEVPASQCHRSPLVLAYDQAHFSALVSMEQK |
| | | ENTKEQAVIPLTDSEYKLLPLHFAVDPGKGWEWGKDDS |
| | | DNVRLASVILSLEVKLHLLHSYMNVKWIPLSSDAQAPL |
| | | AQ |
| FLX00157 VHH₂- | 349 | QVQLVESGGGLVQAGASLRLSCAASERTFGHYAMGWER |
| Cezanne | | QAPGKEREFVATISWKGGTTGYAHSVKGRFTISRDSAK |
| | | NMVYLQMNSLKPEDTAVYYCAARNTMSGSMSSSAYPYW |
| | | GQGTQVTVSSGGGGSGGGGSGGGGSGGGGSQVQLVESG |
| | | GGLVQAGASLRLSCAASERTFGHYAMGWERQAPGKERE |
| | | FVATISWKGGTTGYAHSVKGRFTISRDSAKNMVYLQMN |
| | | SLKPEDTAVYYCAARNTMSGSMSSSAYPYWGQGTQVTV |
| | | SSPPSFSEGSGGSRTPEKGFSDREPTRPPRPILQRQDD |
| | | IVQEKRLSRGISHASSSIVSLARSHVSSNGGGGGSNEH |
| | | PLEMPICAFQLPDLTVYNEDERSFIERDLIEQSMLVAL |
| | | EQAGRLNWWVSVDPTSQRLLPLATTGDGNCLLHAASLG |
| | | MWGFHDRDLMLRKALYALMEKGVEKEALKRRWRWQQTQ |
| | | QNKESGLVYTEDEWQKEWNELIKLASSEPRMHLGTNGA |
| | | NCGGVESSEEPVYESLEEFHVFVLAHVLRRPIVVVADT |
| | | MLRDSGGEAFAPIPEGGIYLPLEVPASQCHRSPLVLAY |
| | | DQAHFSALVSMEQKENTKEQAVIPLTDSEYKLLPLHFA |
| | | VDPGKGWEWGKDDSDNVRLASVILSLEVKLHLLHSYMN |
| | | VKWIPLSSDAQAPLAQ |
| FLX00152 VHH₂- | 350 | QVQLVESGGGLVQPGGSLRLSCAASGFSFSNFPMMWVR |
| GSSSS linker-Cezanne | | QAPGKGREWVADINQDGRNTYYADSVKGRFTISRDNAK |
| | | TTVYLQMNNLNPEDTAVYYCQAIRTTTHEDSWGQGTQV |
| | | TVSSGGGGSGGGGSGGGGSGGGGSQVQLVESGGGLVQP |
| | | GGSLRLSCAASGFSFSNFPMMWVRQAPGKGREWVADIN |
| | | QDGRNTYYADSVKGRFTISRDNAKTTVYLQMNNLNPED |
| | | TAVYYCQAIRTTTHEDSWGQGTQVTVSSGSSSSPPSES |
| | | EGSGGSRTPEKGFSDREPTRPPRPILQRQDDIVQEKRL |
| | | SRGISHASSSIVSLARSHVSSNGGGGGSNEHPLEMPIC |
| | | AFQLPDLTVYNEDERSFIERDLIEQSMLVALEQAGRLN |
| | | WWVSVDPTSQRLLPLATTGDGNCLLHAASLGMWGFHDR |
| | | DLMLRKALYALMEKGVEKEALKRRWRWQQTQQNKESGL |
| | | VYTEDEWQKEWNELIKLASSEPRMHLGTNGANCGGVES |
| | | SEEPVYESLEEFHVFVLAHVLRRPIVVVADTMLRDSGG |
| | | EAFAPIPEGGIYLPLEVPASQCHRSPLVLAYDQAHFSA |
| | | LVSMEQKENTKEQAVIPLTDSEYKLLPLHFAVDPGKGW |
| | | EWGKDDSDNVRLASVILSLEVKLHLLHSYMNVKWIPLS |
| | | SDAQAPLAQ |
| FLX00153 VHH₂- | 351 | QLQLVESGGGLVQPGESLRLSCAASGFTFSNYRMYWVR |
| GSSSS linker-Cezanne | | MAPGKGLEWVSDIDRSGTYTYYADSVKGRFAISRDNAK |
| | | NTVYLQMNSLKPEDTAVYYCAADRRLIVDLTPEVYDHW |
| | | GQGTQVTVSSGGGGSGGGGSGGGGSGGGGSQLQLVESG |
| | | GGLVQPGESLRLSCAASGFTFSNYRMYWVRMAPGKGLE |
| | | WVSDIDRSGTYTYYADSVKGRFAISRDNAKNTVYLQMN |
| | | SLKPEDTAVYYCAADRRLIVDLTPEVYDHWGQGTQVTV |
| | | SSGSSSSPPSFSEGSGGSRTPEKGFSDREPTRPPRPIL |
| | | QRQDDIVQEKRLSRGISHASSSIVSLARSHVSSNGGGG |
| | | GSNEHPLEMPICAFQLPDLTVYNEDERSFIERDLIEQS |
| | | MLVALEQAGRLNWWVSVDPTSQRLLPLATTGDGNCLLH |
| | | AASLGMWGFHDRDLMLRKALYALMEKGVEKEALKRRWR |
| | | WQQTQQNKESGLVYTEDEWQKEWNELIKLASSEPRMHL |
| | | GTNGANCGGVESSEEPVYESLEEFHVFVLAHVLRRPIV |
| | | VVADTMLRDSGGEAFAPIPFGGIYLPLEVPASQCHRSP |
| | | LVLAYDQAHFSALVSMEQKENTKEQAVIPLTDSEYKLL |
| | | PLHFAVDPGKGWEWGKDDSDNVRLASVILSLEVKLHLL |
| | | HSYMNVKWIPLSSDAQAPLAQ |
| FLX00154 VHH₂- | 352 | QVQLVESGGGLVQPGGSLRLSCAASGFIFSSYQMAWVR |
| GSSSS linker-Cezanne | | QAPGKGLEWVADINTGGWNTYYADSVKGRFTISRDNAK |
| | | NTLYLEMNSLKPEDTAVYYCAADRWMVAKIVGGDLDED |
| | | SWGQGTQVTVSSGGGGSGGGGSGGGGSGGGGSQVQLVE |
| | | SGGGLVQPGGSLRLSCAASGFIFSSYQMAWVRQAPGKG |
| | | LEWVADINTGGWNTYYADSVKGRFTISRDNAKNTLYLE |
| | | MNSLKPEDTAVYYCAADRWMVAKIVGGDLDEDSWGQGT |
| | | QVTVSSGSSSSPPSFSEGSGGSRTPEKGFSDREPTRPP |
| | | RPILQRQDDIVQEKRLSRGISHASSSIVSLARSHVSSN |
| | | GGGGGSNEHPLEMPICAFQLPDLTVYNEDERSFIERDL |
| | | IEQSMLVALEQAGRLNWWVSVDPTSQRLLPLATTGDGN |
| | | CLLHAASLGMWGFHDRDLMLRKALYALMEKGVEKEALK |
| | | RRWRWQQTQQNKESGLVYTEDEWQKEWNELIKLASSEP |
| | | RMHLGTNGANCGGVESSEEPVYESLEEFHVFVLAHVLR |
| | | RPIVVVADTMLRDSGGEAFAPIPEGGIYLPLEVPASQC |
| | | HRSPLVLAYDQAHFSALVSMEQKENTKEQAVIPLTDSE |
| | | YKLLPLHFAVDPGKGWEWGKDDSDNVRLASVILSLEVK |
| | | LHLLHSYMNVKWIPLSSDAQAPLAQ |
| FLX00155 VHH₂- | 353 | QVQLVESGGGLVQPGGSLRLSCAASGFAFGSYDMSWVR |
| GSSSS linker-Cezanne | | QAPGQGPEWVSAITPGGGGTFYAYYSDSVKGRFAISRD |
| | | NAKNTLTLQMNSLKPDDTAMYYCAKNFYGNGGRGHGTQ |
| | | VTVSSGGGGSGGGGSGGGGSGGGGSQVQLVESGGGLVQ |
| | | PGGSLRLSCAASGFAFGSYDMSWVRQAPGQGPEWVSAI |
| | | TPGGGGTFYAYYSDSVKGRFAISRDNAKNTLTLQMNSL |
| | | KPDDTAMYYCAKNFYGNGGRGHGTQVTVSSGSSSSPPS |
| | | FSEGSGGSRTPEKGESDREPTRPPRPILQRQDDIVQEK |
| | | RLSRGISHASSSIVSLARSHVSSNGGGGGSNEHPLEMP |
| | | ICAFQLPDLTVYNEDERSFIERDLIEQSMLVALEQAGR |
| | | LNWWVSVDPTSQRLLPLATTGDGNCLLHAASLGMWGFH |
| | | DRDLMLRKALYALMEKGVEKEALKRRWRWQQTQQNKES |
| | | GLVYTEDEWQKEWNELIKLASSEPRMHLGTNGANCGGV |
| | | ESSEEPVYESLEEFHVFVLAHVLRRPIVVVADTMLRDS |
| | | GGEAFAPIPFGGIYLPLEVPASQCHRSPLVLAYDQAHF |
| | | SALVSMEQKENTKEQAVIPLTDSEYKLLPLHFAVDPGK |
| | | GWEWGKDDSDNVRLASVILSLEVKLHLLHSYMNVKWIP |
| | | LSSDAQAPLAQ |
| FLX00156 VHH₂- | 354 | QVQLVESGGGLVQPGGSLRLACAASGFTFGTHAMHWVR |
| GSSSS linker-Cezanne | | WAPGKGFEWVSTISSGGGGTRYADSVKGRFTISRDNAK |
| | | NTVYLQMDNLKPEDTAVYYCNSPSNIANDNWGQGTQVT |
| | | VSSGGGGSGGGGSGGGGSGGGGSQVQLVESGGGLVQPG |
| | | GSLRLACAASGFTFGTHAMHWVRWAPGKGFEWVSTISS |
| | | GGGGTRYADSVKGRFTISRDNAKNTVYLQMDNLKPEDT |
| | | AVYYCNSPSNIANDNWGQGTQVTVSSGSSSSPPSFSEG |
| | | SGGSRTPEKGFSDREPTRPPRPILQRQDDIVQEKRLSR |
| | | GISHASSSIVSLARSHVSSNGGGGGSNEHPLEMPICAF |
| | | QLPDLTVYNEDERSFIERDLIEQSMLVALEQAGRLNWW |
| | | VSVDPTSQRLLPLATTGDGNCLLHAASLGMWGFHDRDL |
| | | MLRKALYALMEKGVEKEALKRRWRWQQTQQNKESGLVY |
| | | TEDEWQKEWNELIKLASSEPRMHLGTNGANCGGVESSE |
| | | EPVYESLEEFHVFVLAHVLRRPIVVVADTMLRDSGGEA |
| | | FAPIPFGGIYLPLEVPASQCHRSPLVLAYDQAHESALV |
| | | SMEQKENTKEQAVIPLTDSEYKLLPLHFAVDPGKGWEW |
| | | GKDDSDNVRLASVILSLEVKLHLLHSYMNVKWIPLSSD |
| | | AQAPLAQ |
| FLX00157 VHH₂- | 355 | QVQLVESGGGLVQAGASLRLSCAASERTFGHYAMGWER |
| GSSSS linker-Cezanne | | QAPGKEREFVATISWKGGTTGYAHSVKGRFTISRDSAK |
| | | NMVYLQMNSLKPEDTAVYYCAARNTMSGSMSSSAYPYW |
| | | GQGTQVTVSSGGGGSGGGGSGGGGSGGGGSQVQLVESG |
| | | GGLVQAGASLRLSCAASERTFGHYAMGWERQAPGKERE |
| | | FVATISWKGGTTGYAHSVKGRFTISRDSAKNMVYLQMN |
| | | SLKPEDTAVYYCAARNTMSGSMSSSAYPYWGQGTQVTV |
| | | SSGSSSSPPSFSEGSGGSRTPEKGFSDREPTRPPRPIL |
| | | QRQDDIVQEKRLSRGISHASSSIVSLARSHVSSNGGGG |
| | | GSNEHPLEMPICAFQLPDLTVYNEDERSFIERDLIEQS |
| | | MLVALEQAGRLNWWVSVDPTSQRLLPLATTGDGNCLLH |
| | | AASLGMWGFHDRDLMLRKALYALMEKGVEKEALKRRWR |
| | | WQQTQQNKESGLVYTEDEWQKEWNELIKLASSEPRMHL |
| | | GTNGANCGGVESSEEPVYESLEEFHVFVLAHVLRRPIV |
| | | VVADTMLRDSGGEAFAPIPFGGIYLPLEVPASQCHRSP |
| | | LVLAYDQAHFSALVSMEQKENTKEQAVIPLTDSEYKLL |
| | | PLHFAVDPGKGWEWGKDDSDNVRLASVILSLEVKLHLL |
| | | HSYMNVKWIPLSSDAQAPLAQ |
| FLX00152 VHH₂- | 356 | QVQLVESGGGLVQPGGSLRLSCAASGFSFSNFPMMWVR |
| (GSSSS)2 linker- | | QAPGKGREWVADINQDGRNTYYADSVKGRFTISRDNAK |
| Cezanne | | TTVYLQMNNLNPEDTAVYYCQAIRTTTHEDSWGQGTQV |
| | | TVSSGGGGSGGGGSGGGGSGGGGSQVQLVESGGGLVQP |
| | | GGSLRLSCAASGFSFSNFPMMWVRQAPGKGREWVADIN |
| | | QDGRNTYYADSVKGRFTISRDNAKTTVYLQMNNLNPED |
| | | TAVYYCQAIRTTTHEDSWGQGTQVTVSSGSSSSGSSSS |
| | | PPSFSEGSGGSRTPEKGESDREPTRPPRPILQRQDDIV |
| | | QEKRLSRGISHASSSIVSLARSHVSSNGGGGGSNEHPL |
| | | EMPICAFQLPDLTVYNEDERSFIERDLIEQSMLVALEQ |
| | | AGRLNWWVSVDPTSQRLLPLATTGDGNCLLHAASLGMW |
| | | GFHDRDLMLRKALYALMEKGVEKEALKRRWRWQQTQQN |
| | | KESGLVYTEDEWQKEWNELIKLASSEPRMHLGTNGANC |
| | | GGVESSEEPVYESLEEFHVFVLAHVLRRPIVVVADTML |
| | | RDSGGEAFAPIPEGGIYLPLEVPASQCHRSPLVLAYDQ |
| | | AHFSALVSMEQKENTKEQAVIPLTDSEYKLLPLHFAVD |
| | | PGKGWEWGKDDSDNVRLASVILSLEVKLHLLHSYMNVK |
| | | WIPLSSDAQAPLAQ |
| FLX00153 VHH₂- | 357 | QLQLVESGGGLVQPGESLRLSCAASGFTFSNYRMYWVR |
| (GSSSS)2 linker- | | MAPGKGLEWVSDIDRSGTYTYYADSVKGRFAISRDNAK |
| Cezanne | | NTVYLQMNSLKPEDTAVYYCAADRRLIVDLTPEVYDHW |
| | | GQGTQVTVSSGGGGSGGGGSGGGGSGGGGSQLQLVESG |
| | | GGLVQPGESLRLSCAASGFTFSNYRMYWVRMAPGKGLE |
| | | WVSDIDRSGTYTYYADSVKGRFAISRDNAKNTVYLQMN |
| | | SLKPEDTAVYYCAADRRLIVDLTPEVYDHWGQGTQVTV |
| | | SSGSSSSGSSSSPPSFSEGSGGSRTPEKGFSDREPTRP |
| | | PRPILQRQDDIVQEKRLSRGISHASSSIVSLARSHVSS |
| | | NGGGGGSNEHPLEMPICAFQLPDLTVYNEDERSFIERD |
| | | LIEQSMLVALEQAGRLNWWVSVDPTSQRLLPLATTGDG |
| | | NCLLHAASLGMWGFHDRDLMLRKALYALMEKGVEKEAL |
| | | KRRWRWQQTQQNKESGLVYTEDEWQKEWNELIKLASSE |
| | | PRMHLGTNGANCGGVESSEEPVYESLEEFHVFVLAHVL |
| | | RRPIVVVADTMLRDSGGEAFAPIPFGGIYLPLEVPASQ |
| | | CHRSPLVLAYDQAHFSALVSMEQKENTKEQAVIPLTDS |
| | | EYKLLPLHFAVDPGKGWEWGKDDSDNVRLASVILSLEV |
| | | KLHLLHSYMNVKWIPLSSDAQAPLAQ |
| FLX00154 VHH₂- | 358 | QVQLVESGGGLVQPGGSLRLSCAASGFIFSSYQMAWVR |
| (GSSSS)2 linker- | | QAPGKGLEWVADINTGGWNTYYADSVKGRFTISRDNAK |
| Cezanne | | NTLYLEMNSLKPEDTAVYYCAADRWMVAKIVGGDLDED |
| | | SWGQGTQVTVSSGGGGSGGGGSGGGGSGGGGSQVQLVE |
| | | SGGGLVQPGGSLRLSCAASGFIFSSYQMAWVRQAPGKG |
| | | LEWVADINTGGWNTYYADSVKGRFTISRDNAKNTLYLE |
| | | MNSLKPEDTAVYYCAADRWMVAKIVGGDLDEDSWGQGT |
| | | QVTVSSGSSSSGSSSSPPSFSEGSGGSRTPEKGESDRE |
| | | PTRPPRPILQRQDDIVQEKRLSRGISHASSSIVSLARS |
| | | HVSSNGGGGGSNEHPLEMPICAFQLPDLTVYNEDERSE |
| | | IERDLIEQSMLVALEQAGRLNWWVSVDPTSQRLLPLAT |
| | | TGDGNCLLHAASLGMWGFHDRDLMLRKALYALMEKGVE |
| | | KEALKRRWRWQQTQQNKESGLVYTEDEWQKEWNELIKL |
| | | ASSEPRMHLGTNGANCGGVESSEEPVYESLEEFHVFVL |
| | | AHVLRRPIVVVADTMLRDSGGEAFAPIPEGGIYLPLEV |
| | | PASQCHRSPLVLAYDQAHFSALVSMEQKENTKEQAVIP |
| | | LTDSEYKLLPLHFAVDPGKGWEWGKDDSDNVRLASVIL |
| | | SLEVKLHLLHSYMNVKWIPLSSDAQAPLAQ |
| FLX00155 VHH₂- | 359 | QVQLVESGGGLVQPGGSLRLSCAASGFAFGSYDMSWVR |
| (GSSSS)2 linker- | | QAPGQGPEWVSAITPGGGGTFYAYYSDSVKGRFAISRD |
| Cezanne | | NAKNTLTLQMNSLKPDDTAMYYCAKNFYGNGGRGHGTQ |
| | | VTVSSGGGGSGGGGSGGGGSGGGGSQVQLVESGGGLVQ |
| | | PGGSLRLSCAASGFAFGSYDMSWVRQAPGQGPEWVSAI |
| | | TPGGGGTFYAYYSDSVKGRFAISRDNAKNTLTLQMNSL |
| | | KPDDTAMYYCAKNFYGNGGRGHGTQVTVSSGSSSSGSS |
| | | SSPPSFSEGSGGSRTPEKGFSDREPTRPPRPILQRQDD |
| | | IVQEKRLSRGISHASSSIVSLARSHVSSNGGGGGSNEH |
| | | PLEMPICAFQLPDLTVYNEDERSFIERDLIEQSMLVAL |
| | | EQAGRLNWWVSVDPTSQRLLPLATTGDGNCLLHAASLG |
| | | MWGFHDRDLMLRKALYALMEKGVEKEALKRRWRWQQTQ |
| | | QNKESGLVYTEDEWQKEWNELIKLASSEPRMHLGTNGA |
| | | NCGGVESSEEPVYESLEEFHVFVLAHVLRRPIVVVADT |
| | | MLRDSGGEAFAPIPFGGIYLPLEVPASQCHRSPLVLAY |
| | | DQAHFSALVSMEQKENTKEQAVIPLTDSEYKLLPLHFA |
| | | VDPGKGWEWGKDDSDNVRLASVILSLEVKLHLLHSYMN |
| | | VKWIPLSSDAQAPLAQ |
| FLX00156 VHH₂- | 360 | QVQLVESGGGLVQPGGSLRLACAASGFTFGTHAMHWVR |
| (GSSSS)2 linker- | | WAPGKGFEWVSTISSGGGGTRYADSVKGRFTISRDNAK |
| Cezanne | | NTVYLQMDNLKPEDTAVYYCNSPSNIANDNWGQGTQVT |
| | | VSSGGGGSGGGGSGGGGSGGGGSQVQLVESGGGLVQPG |
| | | GSLRLACAASGFTFGTHAMHWVRWAPGKGFEWVSTISS |
| | | GGGGTRYADSVKGRFTISRDNAKNTVYLQMDNLKPEDT |
| | | AVYYCNSPSNIANDNWGQGTQVTVSSGSSSSGSSSSPP |
| | | SFSEGSGGSRTPEKGFSDREPTRPPRPILQRQDDIVQE |
| | | KRLSRGISHASSSIVSLARSHVSSNGGGGGSNEHPLEM |
| | | PICAFQLPDLTVYNEDERSFIERDLIEQSMLVALEQAG |
| | | RLNWWVSVDPTSQRLLPLATTGDGNCLLHAASLGMWGF |
| | | HDRDLMLRKALYALMEKGVEKEALKRRWRWQQTQQNKE |
| | | SGLVYTEDEWQKEWNELIKLASSEPRMHLGTNGANCGG |
| | | VESSEEPVYESLEEFHVFVLAHVLRRPIVVVADTMLRD |
| | | SGGEAFAPIPFGGIYLPLEVPASQCHRSPLVLAYDQAH |
| | | FSALVSMEQKENTKEQAVIPLTDSEYKLLPLHFAVDPG |
| | | KGWEWGKDDSDNVRLASVILSLEVKLHLLHSYMNVKWI |
| | | PLSSDAQAPLAQ |
| FLX00157 VHH₂- | 361 | QVQLVESGGGLVQAGASLRLSCAASERTFGHYAMGWER |
| (GSSSS)2 linker- | | QAPGKEREFVATISWKGGTTGYAHSVKGRFTISRDSAK |
| Cezanne | | NMVYLQMNSLKPEDTAVYYCAARNTMSGSMSSSAYPYW |
| | | GQGTQVTVSSGGGGSGGGGSGGGGSGGGGSQVQLVESG |
| | | GGLVQAGASLRLSCAASERTFGHYAMGWFRQAPGKERE |
| | | FVATISWKGGTTGYAHSVKGRFTISRDSAKNMVYLQMN |
| | | SLKPEDTAVYYCAARNTMSGSMSSSAYPYWGQGTQVTV |
| | | SSGSSSSGSSSSPPSFSEGSGGSRTPEKGFSDREPTRP |
| | | PRPILQRQDDIVQEKRLSRGISHASSSIVSLARSHVSS |
| | | NGGGGGSNEHPLEMPICAFQLPDLTVYNEDERSFIERD |
| | | LIEQSMLVALEQAGRLNWWVSVDPTSQRLLPLATTGDG |
| | | NCLLHAASLGMWGFHDRDLMLRKALYALMEKGVEKEAL |
| | | KRRWRWQQTQQNKESGLVYTEDEWQKEWNELIKLASSE |
| | | PRMHLGTNGANCGGVESSEEPVYESLEEFHVFVLAHVL |
| | | RRPIVVVADTMLRDSGGEAFAPIPEGGIYLPLEVPASQ |
| | | CHRSPLVLAYDQAHFSALVSMEQKENTKEQAVIPLTDS |
| | | EYKLLPLHFAVDPGKGWEWGKDDSDNVRLASVILSLEV |
| | | KLHLLHSYMNVKWIPLSSDAQAPLAQ |
| FLX00152 VHH₂- | 362 | QVQLVESGGGLVQPGGSLRLSCAASGFSFSNFPMMWVR |
| (GSSSS)3 linker- | | QAPGKGREWVADINQDGRNTYYADSVKGRFTISRDNAK |
| Cezanne | | TTVYLQMNNLNPEDTAVYYCQAIRTTTHEDSWGQGTQV |
| | | TVSSGGGGSGGGGSGGGGSGGGGSQVQLVESGGGLVQP |
| | | GGSLRLSCAASGESFSNFPMMWVRQAPGKGREWVADIN |
| | | QDGRNTYYADSVKGRFTISRDNAKTTVYLQMNNLNPED |
| | | TAVYYCQAIRTTTHEDSWGQGTQVTVSSGSSSSGSSSS |
| | | GSSSSPPSFSEGSGGSRTPEKGFSDREPTRPPRPILQR |
| | | QDDIVQEKRLSRGISHASSSIVSLARSHVSSNGGGGGS |
| | | NEHPLEMPICAFQLPDLTVYNEDERSFIERDLIEQSML |
| | | VALEQAGRLNWWVSVDPTSQRLLPLATTGDGNCLLHAA |
| | | SLGMWGFHDRDLMLRKALYALMEKGVEKEALKRRWRWQ |
| | | QTQQNKESGLVYTEDEWQKEWNELIKLASSEPRMHLGT |
| | | NGANCGGVESSEEPVYESLEEFHVFVLAHVLRRPIVVV |
| | | ADTMLRDSGGEAFAPIPEGGIYLPLEVPASQCHRSPLV |
| | | LAYDQAHFSALVSMEQKENTKEQAVIPLTDSEYKLLPL |
| | | HFAVDPGKGWEWGKDDSDNVRLASVILSLEVKLHLLHS |
| | | YMNVKWIPLSSDAQAPLAQ |
| FLX00153 VHH₂- | 363 | QLQLVESGGGLVQPGESLRLSCAASGFTFSNYRMYWVR |
| (GSSSS)3linker- | | MAPGKGLEWVSDIDRSGTYTYYADSVKGRFAISRDNAK |
| Cezanne | | NTVYLQMNSLKPEDTAVYYCAADRRLIVDLTPEVYDHW |
| | | GQGTQVTVSSGGGGSGGGGSGGGGSGGGGSQLQLVESG |
| | | GGLVQPGESLRLSCAASGFTFSNYRMYWVRMAPGKGLE |
| | | WVSDIDRSGTYTYYADSVKGRFAISRDNAKNTVYLQMN |
| | | SLKPEDTAVYYCAADRRLIVDLTPEVYDHWGQGTQVTV |
| | | SSGSSSSGSSSSGSSSSPPSFSEGSGGSRTPEKGFSDR |
| | | EPTRPPRPILQRQDDIVQEKRLSRGISHASSSIVSLAR |
| | | SHVSSNGGGGGSNEHPLEMPICAFQLPDLTVYNEDERS |
| | | FIERDLIEQSMLVALEQAGRLNWWVSVDPTSQRLLPLA |
| | | TTGDGNCLLHAASLGMWGFHDRDLMLRKALYALMEKGV |
| | | EKEALKRRWRWQQTQQNKESGLVYTEDEWQKEWNELIK |
| | | LASSEPRMHLGTNGANCGGVESSEEPVYESLEEFHVFV |
| | | LAHVLRRPIVVVADTMLRDSGGEAFAPIPEGGIYLPLE |
| | | VPASQCHRSPLVLAYDQAHESALVSMEQKENTKEQAVI |
| | | PLTDSEYKLLPLHFAVDPGKGWEWGKDDSDNVRLASVI |
| | | LSLEVKLHLLHSYMNVKWIPLSSDAQAPLAQ |
| FLX00154 VHH2- | 364 | QVQLVESGGGLVQPGGSLRLSCAASGFIFSSYQMAWVR |
| (GSSSS)3linker- | | QAPGKGLEWVADINTGGWNTYYADSVKGRFTISRDNAK |
| Cezanne | | NTLYLEMNSLKPEDTAVYYCAADRWMVAKIVGGDLDED |
| | | SWGQGTQVTVSSGGGGSGGGGSGGGGSGGGGSQVQLVE |
| | | SGGGLVQPGGSLRLSCAASGFIFSSYQMAWVRQAPGKG |
| | | LEWVADINTGGWNTYYADSVKGRFTISRDNAKNTLYLE |
| | | MNSLKPEDTAVYYCAADRWMVAKIVGGDLDEDSWGQGT |
| | | QVTVSSGSSSSGSSSSGSSSSPPSFSEGSGGSRTPEKG |
| | | FSDREPTRPPRPILQRQDDIVQEKRLSRGISHASSSIV |
| | | SLARSHVSSNGGGGGSNEHPLEMPICAFQLPDLTVYNE |
| | | DERSFIERDLIEQSMLVALEQAGRLNWWVSVDPTSQRL |
| | | LPLATTGDGNCLLHAASLGMWGFHDRDLMLRKALYALM |
| | | EKGVEKEALKRRWRWQQTQQNKESGLVYTEDEWQKEWN |
| | | ELIKLASSEPRMHLGTNGANCGGVESSEEPVYESLEEF |
| | | HVFVLAHVLRRPIVVVADTMLRDSGGEAFAPIPEGGIY |
| | | LPLEVPASQCHRSPLVLAYDQAHESALVSMEQKENTKE |
| | | QAVIPLTDSEYKLLPLHFAVDPGKGWEWGKDDSDNVRL |
| | | ASVILSLEVKLHLLHSYMNVKWIPLSSDAQAPLAQ |
| FLX00155 VHH₂- | 365 | QVQLVESGGGLVQPGGSLRLSCAASGFAFGSYDMSWVR |
| (GSSSS)3 linker- | | QAPGQGPEWVSAITPGGGGTFYAYYSDSVKGRFAISRD |
| Cezanne | | NAKNTLTLQMNSLKPDDTAMYYCAKNFYGNGGRGHGTQ |
| | | VTVSSGGGGSGGGGSGGGGSGGGGSQVQLVESGGGLVQ |
| | | PGGSLRLSCAASGFAFGSYDMSWVRQAPGQGPEWVSAI |
| | | TPGGGGTFYAYYSDSVKGRFAISRDNAKNTLTLQMNSL |
| | | KPDDTAMYYCAKNFYGNGGRGHGTQVTVSSGSSSSGSS |
| | | SSGSSSSPPSFSEGSGGSRTPEKGESDREPTRPPRPIL |
| | | QRQDDIVQEKRLSRGISHASSSIVSLARSHVSSNGGGG |
| | | GSNEHPLEMPICAFQLPDLTVYNEDERSFIERDLIEQS |
| | | MLVALEQAGRLNWWVSVDPTSQRLLPLATTGDGNCLLH |
| | | AASLGMWGFHDRDLMLRKALYALMEKGVEKEALKRRWR |
| | | WQQTQQNKESGLVYTEDEWQKEWNELIKLASSEPRMHL |
| | | GTNGANCGGVESSEEPVYESLEEFHVEVLAHVLRRPIV |
| | | VVADTMLRDSGGEAFAPIPFGGIYLPLEVPASQCHRSP |
| | | LVLAYDQAHFSALVSMEQKENTKEQAVIPLTDSEYKLL |
| | | PLHFAVDPGKGWEWGKDDSDNVRLASVILSLEVKLHLL |
| | | HSYMNVKWIPLSSDAQAPLAQ |
| FLX00156 VHH₂- | 366 | QVQLVESGGGLVQPGGSLRLACAASGFTFGTHAMHWVR |
| (GSSSS)3 linker- | | WAPGKGFEWVSTISSGGGGTRYADSVKGRFTISRDNAK |
| Cezanne | | NTVYLQMDNLKPEDTAVYYCNSPSNIANDNWGQGTQVT |
| | | VSSGGGGSGGGGSGGGGSGGGGSQVQLVESGGGLVQPG |
| | | GSLRLACAASGFTFGTHAMHWVRWAPGKGFEWVSTISS |
| | | GGGGTRYADSVKGRFTISRDNAKNTVYLQMDNLKPEDT |
| | | AVYYCNSPSNIANDNWGQGTQVTVSSGSSSSGSSSSGS |
| | | SSSPPSESEGSGGSRTPEKGESDREPTRPPRPILQRQD |
| | | DIVQEKRLSRGISHASSSIVSLARSHVSSNGGGGGSNE |
| | | HPLEMPICAFQLPDLTVYNEDERSFIERDLIEQSMLVA |
| | | LEQAGRLNWWVSVDPTSQRLLPLATTGDGNCLLHAASL |
| | | GMWGFHDRDLMLRKALYALMEKGVEKEALKRRWRWQQT |
| | | QQNKESGLVYTEDEWQKEWNELIKLASSEPRMHLGING |
| | | ANCGGVESSEEPVYESLEEFHVFVLAHVLRRPIVVVAD |
| | | TMLRDSGGEAFAPIPEGGIYLPLEVPASQCHRSPLVLA |
| | | YDQAHFSALVSMEQKENTKEQAVIPLTDSEYKLLPLHE |
| | | AVDPGKGWEWGKDDSDNVRLASVILSLEVKLHLLHSYM |
| | | NVKWIPLSSDAQAPLAQ |
| FLX00157 VHH₂- | 367 | QVQLVESGGGLVQAGASLRLSCAASERTFGHYAMGWER |
| (GSSSS)3 linker- | | QAPGKEREFVATISWKGGTTGYAHSVKGRFTISRDSAK |
| Cezanne | | NMVYLQMNSLKPEDTAVYYCAARNTMSGSMSSSAYPYW |
| | | GQGTQVTVSSGGGGSGGGGSGGGGSGGGGSQVQLVESG |
| | | GGLVQAGASLRLSCAASERTFGHYAMGWFRQAPGKERE |
| | | FVATISWKGGTTGYAHSVKGRFTISRDSAKNMVYLQMN |
| | | SLKPEDTAVYYCAARNTMSGSMSSSAYPYWGQGTQVTV |
| | | SSGSSSSGSSSSGSSSSPPSFSEGSGGSRTPEKGFSDR |
| | | EPTRPPRPILQRQDDIVQEKRLSRGISHASSSIVSLAR |
| | | SHVSSNGGGGGSNEHPLEMPICAFQLPDLTVYNEDERS |
| | | FIERDLIEQSMLVALEQAGRLNWWVSVDPTSQRLLPLA |
| | | TTGDGNCLLHAASLGMWGFHDRDLMLRKALYALMEKGV |
| | | EKEALKRRWRWQQTQQNKESGLVYTEDEWQKEWNELIK |
| | | LASSEPRMHLGTNGANCGGVESSEEPVYESLEEFHVEV |
| | | LAHVLRRPIVVVADTMLRDSGGEAFAPIPEGGIYLPLE |
| | | VPASQCHRSPLVLAYDQAHFSALVSMEQKENTKEQAVI |
| | | PLTDSEYKLLPLHFAVDPGKGWEWGKDDSDNVRLASVI |
| | | LSLEVKLHLLHSYMNVKWIPLSSDAQAPLAQ |

[0260] In some embodiments, the fusion protein comprises an amino acid sequence at least 80%, 81%, 82%, 83%, 84%, 85%, 86%, 87%, 88%, 89%, 90%, 91%, 92%, 93%, 94%, 95%, 96%, 97%, 98%, 99%, or 100% identical to the amino acid sequence of any one of SEQ ID NOS: 320-367. In some embodiments, the fusion protein comprises an amino acid sequence at least 80%, 81%, 82%, 83%, 84%, 85%, 86%, 87%, 88%, 89%, 90%, 91%, 92%, 93%, 94%, 95%, 96%, 97%, 98%, 99%, or 100% identical to the amino acid sequence of SEQ ID NO: 320. In some embodiments, the fusion protein comprises an amino acid sequence at least 80%, 81%, 82%, 83%, 84%, 85%, 86%, 87%, 88%, 89%, 90%, 91%, 92%, 93%, 94%, 95%, 96%, 97%, 98%, 99%, or 100% identical to the amino acid sequence of SEQ ID NO: 321. In some embodiments, the fusion protein comprises an amino acid sequence at least 80%, 81%, 82%, 83%, 84%, 85%, 86%, 87%, 88%, 89%, 90%, 91%, 92%, 93%, 94%, 95%, 96%, 97%, 98%, 99%, or 100% identical to the amino acid sequence of SEQ ID NO: 322. In some embodiments, the fusion protein comprises an amino acid sequence at least 80%, 81%, 82%, 83%, 84%, 85%, 86%, 87%, 88%, 89%, 90%, 91%, 92%, 93%, 94%, 95%, 96%, 97%, 98%, 99%, or 100% identical to the amino acid sequence of SEQ ID NO: 323. In some embodiments, the fusion protein comprises an amino acid sequence at least 80%, 81%, 82%, 83%, 84%, 85%, 86%, 87%, 88%, 89%, 90%, 91%, 92%, 93%, 94%, 95%, 96%, 97%, 98%, 99%, or 100% identical to the amino acid sequence of SEQ ID NO: 324. In some embodiments, the fusion protein comprises an amino acid sequence at least 80%, 81%, 82%, 83%, 84%, 85%, 86%, 87%, 88%, 89%, 90%, 91%, 92%, 93%, 94%, 95%, 96%, 97%, 98%, 99%, or 100% identical to the amino acid sequence of SEQ ID NO: 325. In some embodiments, the fusion protein comprises an amino acid sequence at least 80%, 81%, 82%, 83%, 84%, 85%, 86%, 87%, 88%, 89%, 90%, 91%, 92%, 93%, 94%, 95%, 96%, 97%, 98%, 99%, or 100% identical to the amino acid sequence of SEQ ID NO: 326. In some embodiments, the fusion protein comprises an amino acid sequence at least 80%, 81%, 82%, 83%, 84%, 85%, 86%, 87%, 88%, 89%, 90%, 91%, 92%, 93%, 94%, 95%, 96%, 97%, 98%, 99%, or 100% identical to the amino acid sequence of SEQ ID NO: 327. In some embodiments, the fusion protein comprises an amino acid sequence at least 80%, 81%, 82%, 83%, 84%, 85%, 86%, 87%, 88%, 89%, 90%, 91%, 92%, 93%, 94%, 95%, 96%, 97%, 98%, 99%, or 100% identical to the amino acid sequence of SEQ ID NO: 328. In some embodiments, the fusion protein comprises an amino acid sequence at least 80%, 81%, 82%, 83%, 84%, 85%, 86%, 87%, 88%, 89%, 90%, 91%, 92%, 93%, 94%, 95%, 96%, 97%, 98%, 99%, or 100% identical to the amino acid sequence of SEQ ID NO: 329. In some embodiments, the fusion protein comprises an amino acid sequence at least 80%, 81%, 82%, 83%, 84%, 85%, 86%, 87%, 88%, 89%, 90%, 91%, 92%, 93%, 94%, 95%, 96%, 97%, 98%, 99%, or 100% identical to the amino acid sequence of SEQ ID NO: 330. In some embodiments, the fusion protein comprises an amino acid sequence at least 80%, 81%, 82%, 83%, 84%, 85%, 86%, 87%, 88%, 89%, 90%, 91%, 92%, 93%, 94%, 95%, 96%, 97%, 98%, 99%, or 100% identical to the amino acid sequence of SEQ ID NO: 331. In some embodiments, the fusion protein comprises an amino acid sequence at least 80%, 81%, 82%, 83%, 84%, 85%, 86%, 87%, 88%, 89%, 90%, 91%, 92%, 93%, 94%, 95%, 96%, 97%, 98%, 99%, or 100% identical to the amino acid sequence of SEQ ID NO: 332. In some embodiments, the fusion protein comprises an amino acid sequence at least 80%, 81%, 82%, 83%, 84%, 85%, 86%, 87%, 88%, 89%, 90%, 91%, 92%, 93%, 94%, 95%, 96%, 97%, 98%, 99%, or 100% identical to the amino acid sequence of SEQ ID NO: 333. In some embodiments, the fusion protein comprises an amino acid sequence at least 80%, 81%, 82%, 83%, 84%, 85%, 86%, 87%, 88%, 89%, 90%, 91%, 92%, 93%, 94%, 95%, 96%, 97%, 98%, 99%, or 100% identical to the amino acid sequence of SEQ ID NO: 334. In some embodiments, the fusion protein comprises an amino acid sequence at least 80%, 81%, 82%, 83%, 84%, 85%, 86%, 87%, 88%, 89%, 90%, 91%, 92%, 93%, 94%, 95%, 96%, 97%, 98%, 99%, or 100% identical to the amino acid sequence of SEQ ID NO: 335. In some embodiments, the fusion protein comprises an amino acid sequence at least 80%, 81%, 82%, 83%, 84%, 85%, 86%, 87%, 88%, 89%, 90%, 91%, 92%, 93%, 94%, 95%, 96%, 97%, 98%, 99%, or 100% identical to the amino acid sequence of SEQ ID NO: 336. In some embodiments, the fusion protein comprises an amino acid sequence at least 80%, 81%, 82%, 83%, 84%, 85%, 86%, 87%, 88%, 89%, 90%, 91%, 92%, 93%, 94%, 95%, 96%, 97%, 98%, 99%, or 100% identical to the amino acid sequence of SEQ ID NO: 337. In some embodiments, the fusion protein comprises an amino acid sequence at least 80%, 81%, 82%, 83%, 84%, 85%, 86%, 87%, 88%, 89%, 90%, 91%, 92%, 93%, 94%, 95%, 96%, 97%, 98%, 99%, or 100% identical to the amino acid sequence of SEQ ID NO: 338. In some embodiments, the fusion protein comprises an amino acid sequence at least 80%, 81%, 82%, 83%, 84%, 85%, 86%, 87%, 88%, 89%, 90%, 91%, 92%, 93%, 94%, 95%, 96%, 97%, 98%, 99%, or 100% identical to the amino acid sequence of SEQ ID NO: 339. In some embodiments, the fusion protein comprises an amino acid sequence at least 80%, 81%, 82%, 83%, 84%, 85%, 86%, 87%, 88%, 89%, 90%, 91%, 92%, 93%, 94%, 95%, 96%, 97%, 98%, 99%, or 100% identical to the amino acid sequence of SEQ ID NO: 340. In some embodiments, the fusion protein comprises an amino acid sequence at least 80%, 81%, 82%, 83%, 84%, 85%, 86%, 87%, 88%, 89%, 90%, 91%, 92%, 93%, 94%, 95%, 96%, 97%, 98%, 99%, or 100% identical to the amino acid sequence of SEQ ID NO: 341. In some embodiments, the fusion protein comprises an amino acid sequence at least 80%, 81%, 82%, 83%, 84%, 85%, 86%, 87%, 88%, 89%, 90%, 91%, 92%, 93%, 94%, 95%, 96%, 97%, 98%, 99%, or 100% identical to the amino acid sequence of SEQ ID NO: 342. In some embodiments, the fusion protein comprises an amino acid sequence at least 80%, 81%, 82%, 83%, 84%, 85%, 86%, 87%, 88%, 89%, 90%, 91%, 92%, 93%, 94%, 95%, 96%, 97%, 98%, 99%, or 100% identical to the amino acid sequence of SEQ ID NO: 343. In some embodiments, the fusion protein comprises an amino acid sequence at least 80%, 81%, 82%, 83%, 84%, 85%, 86%, 87%, 88%, 89%, 90%, 91%, 92%, 93%, 94%, 95%, 96%, 97%, 98%, 99%, or 100% identical to the amino acid sequence of SEQ ID NO: 344. In some embodiments, the fusion protein comprises an amino acid sequence at least 80%, 81%, 82%, 83%, 84%, 85%, 86%, 87%, 88%, 89%, 90%, 91%, 92%, 93%, 94%, 95%, 96%, 97%, 98%, 99%, or 100% identical to the amino acid sequence of SEQ ID NO: 345. In some embodiments, the fusion protein comprises an amino acid sequence at least 80%, 81%, 82%, 83%, 84%, 85%, 86%, 87%, 88%, 89%, 90%, 91%, 92%, 93%, 94%, 95%, 96%, 97%, 98%, 99%, or 100% identical to the amino acid sequence of SEQ ID NO: 346. In some embodiments, the fusion protein comprises an amino acid sequence at least 80%, 81%, 82%, 83%, 84%, 85%, 86%, 87%, 88%, 89%, 90%, 91%, 92%, 93%, 94%, 95%, 96%, 97%, 98%, 99%, or 100% identical to the amino acid sequence of SEQ ID NO: 347. In some embodiments, the fusion protein comprises an amino acid sequence at least 80%, 81%, 82%, 83%, 84%, 85%, 86%, 87%, 88%, 89%, 90%, 91%, 92%, 93%, 94%, 95%, 96%, 97%, 98%, 99%, or 100% identical to the amino acid sequence of SEQ ID NO: 348. In some embodiments, the fusion protein comprises an amino acid sequence at least 80%, 81%, 82%, 83%, 84%, 85%, 86%, 87%, 88%, 89%, 90%, 91%, 92%, 93%, 94%, 95%, 96%, 97%, 98%, 99%, or 100% identical to the amino acid sequence of SEQ ID NO: 349. In some embodiments, the fusion protein comprises an amino acid sequence at least 80%, 81%, 82%, 83%, 84%, 85%, 86%, 87%, 88%, 89%, 90%, 91%, 92%, 93%, 94%, 95%, 96%, 97%, 98%, 99%, or 100% identical to the amino acid sequence of SEQ ID NO: 350. In some embodiments, the fusion protein comprises an amino acid sequence at least 80%, 81%, 82%, 83%, 84%, 85%, 86%, 87%, 88%, 89%, 90%, 91%, 92%, 93%, 94%, 95%, 96%, 97%, 98%, 99%, or 100% identical to the amino acid sequence of SEQ ID NO: 351. In some embodiments, the fusion protein comprises an amino acid sequence at least 80%, 81%, 82%, 83%, 84%, 85%, 86%, 87%, 88%, 89%, 90%, 91%, 92%, 93%, 94%, 95%, 96%, 97%, 98%, 99%, or 100% identical to the amino acid sequence of SEQ ID NO: 352. In some embodiments, the fusion protein comprises an amino acid sequence at least 80%, 81%, 82%, 83%, 84%, 85%, 86%, 87%, 88%, 89%, 90%, 91%, 92%, 93%, 94%, 95%, 96%, 97%, 98%, 99%, or 100% identical to the amino acid sequence of SEQ ID NO: 353. In some embodiments, the fusion protein comprises an amino acid sequence at least 80%, 81%, 82%, 83%, 84%, 85%, 86%, 87%, 88%, 89%, 90%, 91%, 92%, 93%, 94%, 95%, 96%, 97%, 98%, 99%, or 100% identical to the amino acid sequence of SEQ ID NO: 354. In some embodiments, the fusion protein comprises an amino acid sequence at least 80%, 81%, 82%, 83%, 84%, 85%, 86%, 87%, 88%, 89%, 90%, 91%, 92%, 93%, 94%, 95%, 96%, 97%, 98%, 99%, or 100% identical to the amino acid sequence of SEQ ID NO: 355. In some embodiments, the fusion protein comprises an amino acid sequence at least 80%, 81%, 82%, 83%, 84%, 85%, 86%, 87%, 88%, 89%, 90%, 91%, 92%, 93%, 94%, 95%, 96%, 97%, 98%, 99%, or 100% identical to the amino acid sequence of SEQ ID NO: 356. In some embodiments, the fusion protein comprises an amino acid sequence at least 80%, 81%, 82%, 83%, 84%, 85%, 86%, 87%, 88%, 89%, 90%, 91%, 92%, 93%, 94%, 95%, 96%, 97%, 98%, 99%, or 100% identical to the amino acid sequence of SEQ ID NO: 357. In some embodiments, the fusion protein comprises an amino acid sequence at least 80%, 81%, 82%, 83%, 84%, 85%, 86%, 87%, 88%, 89%, 90%, 91%, 92%, 93%, 94%, 95%, 96%, 97%, 98%, 99%, or 100% identical to the amino acid sequence of SEQ ID NO: 358. In some embodiments, the fusion protein comprises an amino acid sequence at least 80%, 81%, 82%, 83%, 84%, 85%, 86%, 87%, 88%, 89%, 90%, 91%, 92%, 93%, 94%, 95%, 96%, 97%, 98%, 99%, or 100% identical to the amino acid sequence of SEQ ID NO: 359. In some embodiments, the fusion protein comprises an amino acid sequence at least 80%, 81%, 82%, 83%, 84%, 85%, 86%, 87%, 88%, 89%, 90%, 91%, 92%, 93%, 94%, 95%, 96%, 97%, 98%, 99%, or 100% identical to the amino acid sequence of SEQ ID NO: 360. In some embodiments, the fusion protein comprises an amino acid sequence at least 80%, 81%, 82%, 83%, 84%, 85%, 86%, 87%, 88%, 89%, 90%, 91%, 92%, 93%, 94%, 95%, 96%, 97%, 98%, 99%, or 100% identical to the amino acid sequence of SEQ ID NO: 361. In some embodiments, the fusion protein comprises an amino acid sequence at least 80%, 81%, 82%, 83%, 84%, 85%, 86%, 87%, 88%, 89%, 90%, 91%, 92%, 93%, 94%, 95%, 96%, 97%, 98%, 99%, or 100% identical to the amino acid sequence of SEQ ID NO: 362. In some embodiments, the fusion protein comprises an amino acid sequence at least 80%, 81%, 82%, 83%, 84%, 85%, 86%, 87%, 88%, 89%, 90%, 91%, 92%, 93%, 94%, 95%, 96%, 97%, 98%, 99%, or 100% identical to the amino acid sequence of SEQ ID NO: 363. In some embodiments, the fusion protein comprises an amino acid sequence at least 80%, 81%, 82%, 83%, 84%, 85%, 86%, 87%, 88%, 89%, 90%, 91%, 92%, 93%, 94%, 95%, 96%, 97%, 98%, 99%, or 100% identical to the amino acid sequence of SEQ ID NO: 364. In some embodiments, the fusion protein comprises an amino acid sequence at least 80%, 81%, 82%, 83%, 84%, 85%, 86%, 87%, 88%, 89%, 90%, 91%, 92%, 93%, 94%, 95%, 96%, 97%, 98%, 99%, or 100% identical to the amino acid sequence of SEQ ID NO: 365. In some embodiments, the fusion protein comprises an amino acid sequence at least 80%, 81%, 82%, 83%, 84%, 85%, 86%, 87%, 88%, 89%, 90%, 91%, 92%, 93%, 94%, 95%, 96%, 97%, 98%, 99%, or 100% identical to the amino acid sequence of SEQ ID NO: 366. In some embodiments, the fusion protein comprises an amino acid sequence at least 80%, 81%, 82%, 83%, 84%, 85%, 86%, 87%, 88%, 89%, 90%, 91%, 92%, 93%, 94%, 95%, 96%, 97%, 98%, 99%, or 100% identical to the amino acid sequence of SEQ ID NO: 367.

[0261] In some embodiments, the fusion protein consists of an amino acid sequence at least 80%, 81%, 82%, 83%, 84%, 85%, 86%, 87%, 88%, 89%, 90%, 91%, 92%, 93%, 94%, 95%, 96%, 97%, 98%, 99%, or 100% identical to the amino acid sequence of any one of SEQ ID NOS: 320-367. In some embodiments, the fusion protein consists of an amino acid sequence at least 80%, 81%, 82%, 83%, 84%, 85%, 86%, 87%, 88%, 89%, 90%, 91%, 92%, 93%, 94%, 95%, 96%, 97%, 98%, 99%, or 100% identical to the amino acid sequence of SEQ ID NO: 320. In some embodiments, the fusion protein consists of an amino acid sequence at least 80%, 81%, 82%, 83%, 84%, 85%, 86%, 87%, 88%, 89%, 90%, 91%, 92%, 93%, 94%, 95%, 96%, 97%, 98%, 99%, or 100% identical to the amino acid sequence of SEQ ID NO: 321. In some embodiments, the fusion protein consists of an amino acid sequence at least 80%, 81%, 82%, 83%, 84%, 85%, 86%, 87%, 88%, 89%, 90%, 91%, 92%, 93%, 94%, 95%, 96%, 97%, 98%, 99%, or 100% identical to the amino acid sequence of SEQ ID NO: 322. In some embodiments, the fusion protein consists of an amino acid sequence at least 80%, 81%, 82%, 83%, 84%, 85%, 86%, 87%, 88%, 89%, 90%, 91%, 92%, 93%, 94%, 95%, 96%, 97%, 98%, 99%, or 100% identical to the amino acid sequence of SEQ ID NO: 323. In some embodiments, the fusion protein consists of an amino acid sequence at least 80%, 81%, 82%, 83%, 84%, 85%, 86%, 87%, 88%, 89%, 90%, 91%, 92%, 93%, 94%, 95%, 96%, 97%, 98%, 99%, or 100% identical to the amino acid sequence of SEQ ID NO: 324. In some embodiments, the fusion protein consists of an amino acid sequence at least 80%, 81%, 82%, 83%, 84%, 85%, 86%, 87%, 88%, 89%, 90%, 91%, 92%, 93%, 94%, 95%, 96%, 97%, 98%, 99%, or 100% identical to the amino acid sequence of SEQ ID NO: 325. In some embodiments, the fusion protein consists of an amino acid sequence at least 80%, 81%, 82%, 83%, 84%, 85%, 86%, 87%, 88%, 89%, 90%, 91%, 92%, 93%, 94%, 95%, 96%, 97%, 98%, 99%, or 100% identical to the amino acid sequence of SEQ ID NO: 326. In some embodiments, the fusion protein consists of an amino acid sequence at least 80%, 81%, 82%, 83%, 84%, 85%, 86%, 87%, 88%, 89%, 90%, 91%, 92%, 93%, 94%, 95%, 96%, 97%, 98%, 99%, or 100% identical to the amino acid sequence of SEQ ID NO: 327. In some embodiments, the fusion protein consists of an amino acid sequence at least 80%, 81%, 82%, 83%, 84%, 85%, 86%, 87%, 88%, 89%, 90%, 91%, 92%, 93%, 94%, 95%, 96%, 97%, 98%, 99%, or 100% identical to the amino acid sequence of SEQ ID NO: 328. In some embodiments, the fusion protein consists of an amino acid sequence at least 80%, 81%, 82%, 83%, 84%, 85%, 86%, 87%, 88%, 89%, 90%, 91%, 92%, 93%, 94%, 95%, 96%, 97%, 98%, 99%, or 100% identical to the amino acid sequence of SEQ ID NO: 329. In some embodiments, the fusion protein consists of an amino acid sequence at least 80%, 81%, 82%, 83%, 84%, 85%, 86%, 87%, 88%, 89%, 90%, 91%, 92%, 93%, 94%, 95%, 96%, 97%, 98%, 99%, or 100% identical to the amino acid sequence of SEQ ID NO: 330. In some embodiments, the fusion protein consists of an amino acid sequence at least 80%, 81%, 82%, 83%, 84%, 85%, 86%, 87%, 88%, 89%, 90%, 91%, 92%, 93%, 94%, 95%, 96%, 97%, 98%, 99%, or 100% identical to the amino acid sequence of SEQ ID NO: 331. In some embodiments, the fusion protein consists of an amino acid sequence at least 80%, 81%, 82%, 83%, 84%, 85%, 86%, 87%, 88%, 89%, 90%, 91%, 92%, 93%, 94%, 95%, 96%, 97%, 98%, 99%, or 100% identical to the amino acid sequence of SEQ ID NO: 332. In some embodiments, the fusion protein consists of an amino acid sequence at least 80%, 81%, 82%, 83%, 84%, 85%, 86%, 87%, 88%, 89%, 90%, 91%, 92%, 93%, 94%, 95%, 96%, 97%, 98%, 99%, or 100% identical to the amino acid sequence of SEQ ID NO: 333. In some embodiments, the fusion protein consists of an amino acid sequence at least 80%, 81%, 82%, 83%, 84%, 85%, 86%, 87%, 88%, 89%, 90%, 91%, 92%, 93%, 94%, 95%, 96%, 97%, 98%, 99%, or 100% identical to the amino acid sequence of SEQ ID NO: 334. In some embodiments, the fusion protein consists of an amino acid sequence at least 80%, 81%, 82%, 83%, 84%, 85%, 86%, 87%, 88%, 89%, 90%, 91%, 92%, 93%, 94%, 95%, 96%, 97%, 98%, 99%, or 100% identical to the amino acid sequence of SEQ ID NO: 335. In some embodiments, the fusion protein consists of an amino acid sequence at least 80%, 81%, 82%, 83%, 84%, 85%, 86%, 87%, 88%, 89%, 90%, 91%, 92%, 93%, 94%, 95%, 96%, 97%, 98%, 99%, or 100% identical to the amino acid sequence of SEQ ID NO: 336. In some embodiments, the fusion protein consists of an amino acid sequence at least 80%, 81%, 82%, 83%, 84%, 85%, 86%, 87%, 88%, 89%, 90%, 91%, 92%, 93%, 94%, 95%, 96%, 97%, 98%, 99%, or 100% identical to the amino acid sequence of SEQ ID NO: 337. In some embodiments, the fusion protein consists of an amino acid sequence at least 80%, 81%, 82%, 83%, 84%, 85%, 86%, 87%, 88%, 89%, 90%, 91%, 92%, 93%, 94%, 95%, 96%, 97%, 98%, 99%, or 100% identical to the amino acid sequence of SEQ ID NO: 338. In some embodiments, the fusion protein consists of an amino acid sequence at least 80%, 81%, 82%, 83%, 84%, 85%, 86%, 87%, 88%, 89%, 90%, 91%, 92%, 93%, 94%, 95%, 96%, 97%, 98%, 99%, or 100% identical to the amino acid sequence of SEQ ID NO: 339. In some embodiments, the fusion protein consists of an amino acid sequence at least 80%, 81%, 82%, 83%, 84%, 85%, 86%, 87%, 88%, 89%, 90%, 91%, 92%, 93%, 94%, 95%, 96%, 97%, 98%, 99%, or 100% identical to the amino acid sequence of SEQ ID NO: 340. In some embodiments, the fusion protein consists of an amino acid sequence at least 80%, 81%, 82%, 83%, 84%, 85%, 86%, 87%, 88%, 89%, 90%, 91%, 92%, 93%, 94%, 95%, 96%, 97%, 98%, 99%, or 100% identical to the amino acid sequence of SEQ ID NO: 341. In some embodiments, the fusion protein consists of an amino acid sequence at least 80%, 81%, 82%, 83%, 84%, 85%, 86%, 87%, 88%, 89%, 90%, 91%, 92%, 93%, 94%, 95%, 96%, 97%, 98%, 99%, or 100% identical to the amino acid sequence of SEQ ID NO: 342. In some embodiments, the fusion protein consists of an amino acid sequence at least 80%, 81%, 82%, 83%, 84%, 85%, 86%, 87%, 88%, 89%, 90%, 91%, 92%, 93%, 94%, 95%, 96%, 97%, 98%, 99%, or 100% identical to the amino acid sequence of SEQ ID NO: 343. In some embodiments, the fusion protein consists of an amino acid sequence at least 80%, 81%, 82%, 83%, 84%, 85%, 86%, 87%, 88%, 89%, 90%, 91%, 92%, 93%, 94%, 95%, 96%, 97%, 98%, 99%, or 100% identical to the amino acid sequence of SEQ ID NO: 344. In some embodiments, the fusion protein consists of an amino acid sequence at least 80%, 81%, 82%, 83%, 84%, 85%, 86%, 87%, 88%, 89%, 90%, 91%, 92%, 93%, 94%, 95%, 96%, 97%, 98%, 99%, or 100% identical to the amino acid sequence of SEQ ID NO: 345. In some embodiments, the fusion protein consists of an amino acid sequence at least 80%, 81%, 82%, 83%, 84%, 85%, 86%, 87%, 88%, 89%, 90%, 91%, 92%, 93%, 94%, 95%, 96%, 97%, 98%, 99%, or 100% identical to the amino acid sequence of SEQ ID NO: 346. In some embodiments, the fusion protein consists of an amino acid sequence at least 80%, 81%, 82%, 83%, 84%, 85%, 86%, 87%, 88%, 89%, 90%, 91%, 92%, 93%, 94%, 95%, 96%, 97%, 98%, 99%, or 100% identical to the amino acid sequence of SEQ ID NO: 347. In some embodiments, the fusion protein consists of an amino acid sequence at least 80%, 81%, 82%, 83%, 84%, 85%, 86%, 87%, 88%, 89%, 90%, 91%, 92%, 93%, 94%, 95%, 96%, 97%, 98%, 99%, or 100% identical to the amino acid sequence of SEQ ID NO: 348. In some embodiments, the fusion protein consists of an amino acid sequence at least 80%, 81%, 82%, 83%, 84%, 85%, 86%, 87%, 88%, 89%, 90%, 91%, 92%, 93%, 94%, 95%, 96%, 97%, 98%, 99%, or 100% identical to the amino acid sequence of SEQ ID NO: 349. In some embodiments, the fusion protein consists of an amino acid sequence at least 80%, 81%, 82%, 83%, 84%, 85%, 86%, 87%, 88%, 89%, 90%, 91%, 92%, 93%, 94%, 95%, 96%, 97%, 98%, 99%, or 100% identical to the amino acid sequence of SEQ ID NO: 350. In some embodiments, the fusion protein consists of an amino acid sequence at least 80%, 81%, 82%, 83%, 84%, 85%, 86%, 87%, 88%, 89%, 90%, 91%, 92%, 93%, 94%, 95%, 96%, 97%, 98%, 99%, or 100% identical to the amino acid sequence of SEQ ID NO: 351. In some embodiments, the fusion protein consists of an amino acid sequence at least 80%, 81%, 82%, 83%, 84%, 85%, 86%, 87%, 88%, 89%, 90%, 91%, 92%, 93%, 94%, 95%, 96%, 97%, 98%, 99%, or 100% identical to the amino acid sequence of SEQ ID NO: 352. In some embodiments, the fusion protein consists of an amino acid sequence at least 80%, 81%, 82%, 83%, 84%, 85%, 86%, 87%, 88%, 89%, 90%, 91%, 92%, 93%, 94%, 95%, 96%, 97%, 98%, 99%, or 100% identical to the amino acid sequence of SEQ ID NO: 353. In some embodiments, the fusion protein consists of an amino acid sequence at least 80%, 81%, 82%, 83%, 84%, 85%, 86%, 87%, 88%, 89%, 90%, 91%, 92%, 93%, 94%, 95%, 96%, 97%, 98%, 99%, or 100% identical to the amino acid sequence of SEQ ID NO: 354. In some embodiments, the fusion protein consists of an amino acid sequence at least 80%, 81%, 82%, 83%, 84%, 85%, 86%, 87%, 88%, 89%, 90%, 91%, 92%, 93%, 94%, 95%, 96%, 97%, 98%, 99%, or 100% identical to the amino acid sequence of SEQ ID NO: 355. In some embodiments, the fusion protein consists of an amino acid sequence at least 80%, 81%, 82%, 83%, 84%, 85%, 86%, 87%, 88%, 89%, 90%, 91%, 92%, 93%, 94%, 95%, 96%, 97%, 98%, 99%, or 100% identical to the amino acid sequence of SEQ ID NO: 356. In some embodiments, the fusion protein consists of an amino acid sequence at least 80%, 81%, 82%, 83%, 84%, 85%, 86%, 87%, 88%, 89%, 90%, 91%, 92%, 93%, 94%, 95%, 96%, 97%, 98%, 99%, or 100% identical to the amino acid sequence of SEQ ID NO: 357. In some embodiments, the fusion protein consists of an amino acid sequence at least 80%, 81%, 82%, 83%, 84%, 85%, 86%, 87%, 88%, 89%, 90%, 91%, 92%, 93%, 94%, 95%, 96%, 97%, 98%, 99%, or 100% identical to the amino acid sequence of SEQ ID NO: 358. In some embodiments, the fusion protein consists of an amino acid sequence at least 80%, 81%, 82%, 83%, 84%, 85%, 86%, 87%, 88%, 89%, 90%, 91%, 92%, 93%, 94%, 95%, 96%, 97%, 98%, 99%, or 100% identical to the amino acid sequence of SEQ ID NO: 359. In some embodiments, the fusion protein consists of an amino acid sequence at least 80%, 81%, 82%, 83%, 84%, 85%, 86%, 87%, 88%, 89%, 90%, 91%, 92%, 93%, 94%, 95%, 96%, 97%, 98%, 99%, or 100% identical to the amino acid sequence of SEQ ID NO: 360. In some embodiments, the fusion protein consists of an amino acid sequence at least 80%, 81%, 82%, 83%, 84%, 85%, 86%, 87%, 88%, 89%, 90%, 91%, 92%, 93%, 94%, 95%, 96%, 97%, 98%, 99%, or 100% identical to the amino acid sequence of SEQ ID NO: 361. In some embodiments, the fusion protein consists of an amino acid sequence at least 80%, 81%, 82%, 83%, 84%, 85%, 86%, 87%, 88%, 89%, 90%, 91%, 92%, 93%, 94%, 95%, 96%, 97%, 98%, 99%, or 100% identical to the amino acid sequence of SEQ ID NO: 362. In some embodiments, the fusion protein consists of an amino acid sequence at least 80%, 81%, 82%, 83%, 84%, 85%, 86%, 87%, 88%, 89%, 90%, 91%, 92%, 93%, 94%, 95%, 96%, 97%, 98%, 99%, or 100% identical to the amino acid sequence of SEQ ID NO: 363. In some embodiments, the fusion protein consists of an amino acid sequence at least 80%, 81%, 82%, 83%, 84%, 85%, 86%, 87%, 88%, 89%, 90%, 91%, 92%, 93%, 94%, 95%, 96%, 97%, 98%, 99%, or 100% identical to the amino acid sequence of SEQ ID NO: 364. In some embodiments, the fusion protein consists of an amino acid sequence at least 80%, 81%, 82%, 83%, 84%, 85%, 86%, 87%, 88%, 89%, 90%, 91%, 92%, 93%, 94%, 95%, 96%, 97%, 98%, 99%, or 100% identical to the amino acid sequence of SEQ ID NO: 365. In some embodiments, the fusion protein consists of an amino acid sequence at least 80%, 81%, 82%, 83%, 84%, 85%, 86%, 87%, 88%, 89%, 90%, 91%, 92%, 93%, 94%, 95%, 96%, 97%, 98%, 99%, or 100% identical to the amino acid sequence of SEQ ID NO: 366. In some embodiments, the fusion protein consists of an amino acid sequence at least 80%, 81%, 82%, 83%, 84%, 85%, 86%, 87%, 88%, 89%, 90%, 91%, 92%, 93%, 94%, 95%, 96%, 97%, 98%, 99%, or 100% identical to the amino acid sequence of SEQ ID NO: 367.

### 5.3.4.1 Additional Exemplary Embodiments

[0262] Additional exemplary embodiments of fusion proteins described herein are provided below, which should not be construed as limiting.

[0263] Embodiment 1. A fusion protein comprising: (a) an effector moiety comprising a functional fragment of a human deubiquitinase that is capable of mediating deubiquitination, wherein the human deubiquitinase comprises an amino acid sequence at least 80%, 81%, 82%, 83%, 84%, 85%, 86%, 87%, 88%, 89%, 90%, 95%, 96%, 97%, 98%, 99%, or 100% identical to the amino acid sequence of any one of SEQ ID NOS: 1-112, and a targeting moiety comprising a VHH, (VHH)₂. or scFv that specifically binds to a cytosolic protein.

[0264] Embodiment 2. A fusion protein comprising an effector moiety comprising a functional fragment of a human deubiquitinase that is capable of mediating deubiquitination that comprises an amino acid sequence at least 80%, 81%, 82%, 83%, 84%, 85%, 86%, 87%, 88%, 89%, 90%, 95%, 96%, 97%, 98%, 99%, or 100% identical to the amino acid sequence of any one of SEQ ID NOS: 113-220 or 286, and a targeting moiety comprising a VHH, (VHH)₂, or scFv that specifically binds to a cytosolic protein.

[0265] Embodiment 3. A fusion protein comprising an effector moiety comprising a functional fragment of a human deubiquitinase that is capable of mediating deubiquitination that comprises an amino acid sequence at least 80%, 81%, 82%, 83%, 84%, 85%, 86%, 87%, 88%, 89%, 90%, 95%, 96%, 97%, 98%, 99%, or 100% identical to the amino acid sequence of SEQ ID NO: 286, and a targeting moiety comprising a VHH, (VHH)₂, or scFv that specifically binds to a cytosolic protein.

[0266] Embodiment 4. The fusion protein of any one of Embodiments 1-3, wherein the cytosolic protein is cyclin-dependent kinase-like 5 (CDKL5), copper-transporting ATPase 2 (ATP7B), syntaxin-binding protein 1 (STXBP1), Ras/Rap GTPase-activating protein (SYNGAP1), progranulin (GRN), protein jagged-1 (JAG1), GATOR complex protein DEPDC5 (DEPDC5), tuberin (TSC2), hamartin (TSC1), kinesin-like protein KIF1A (KIF1A), dynamin-1 (DNM1), SH3 and multiple ankyrin repeat domains protein 3 (SHANK3), dystrophin (DMD), oxygen-regulated protein 1 (RP1), titin (TTN), cytoplasmic dynein 1 heavy chain 1 (DYNC1H1), TRIO and F-actin-binding protein (TRIO), probable ubiquitin carboxyl-terminal hydrolase FAF-X (USP9X), Pyrin domain-containing protein 2 (PYDC2), cystatin-B (CSTB), or pterin-4-alpha-carbinolamine dehydratase (PCBD1).

[0267] Embodiment 5. The fusion protein of any one of Embodiments 1-4, wherein said cytosolic protein is SHANK3, SYNGAP1, PYCD2, CSTB, or PCBD1.

[0268] Embodiment 6. The fusion protein of any one of Embodiments 1-5, wherein said cytosolic protein is SHANK3, SYNGAP1, CSTB, or PCBD1.

[0269] Embodiment 7. The fusion protein of any one of Embodiments 1-6, wherein said cytosolic protein is SYNGAP1.

[0270] Embodiment 8. The fusion protein of any one of Embodiments 1-7, wherein said targeting moiety is a VHH or (VHH)₂.

[0271] Embodiment 9. The fusion protein of any one of Embodiments 1-8, wherein said targeting moiety comprises a VHH described in Table 3.

[0272] Embodiment 10. The fusion protein of any one of Embodiments 1-9, wherein said targeting moiety comprises a VHH that comprises a CDR1, CDR2, and CDR3 of a VHH that is described in Table 3.

[0273] Embodiment 11. The fusion protein of any one of Embodiments 1-10, wherein said VHH comprises a CDR1 that comprises the amino acid sequence of SEQ ID NO: 290, 294, 298, 302, 306, or 310, or the amino acid sequence of SEQ ID NO: 290, 294, 298, 302, 306, or 310 with 1, 2, or 3 amino acid modifications (e.g., a substitution, deletion, or addition); a CDR2 that comprises the amino acid sequence of SEQ ID NO: 291, 295, 299, 303, 307, or 311, or the amino acid sequence of SEQ ID NO: 291, 295, 299, 303, 307, or 311 with 1, 2, or 3 amino acid modifications (e.g., a substitution, deletion, or addition); and/or a CDR3 that comprises the amino acid sequence of SEQ ID NO: 292, 296, 300, 304, 308, or 312 or the amino acid sequence of SEQ ID NO: 292, 296, 300, 304, 308, or 312 with 1, 2, or 3 amino acid modifications (e.g., a substitution, deletion, or addition).

[0274] Embodiment 12. The fusion protein of any one of Embodiments 1-11, wherein said targeting moiety comprises a VHH that comprises an amino acid sequence at least 80%, 81%, 82%, 83%, 84%, 85%, 86%, 87%, 88%, 89%, 90%, 95%, 96%, 97%, 98%, 99%, or 100% identical to the amino acid sequence of a VHH that is described in Table 3.

[0275] Embodiment 13. The fusion protein of any one of Embodiments 1-12, wherein said targeting moiety comprises a VHH that comprises an amino acid sequence at least 80%, 81%, 82%, 83%, 84%, 85%, 86%, 87%, 88%, 89%, 90%, 95%, 96%, 97%, 98%, 99%, or 100% identical to the amino acid sequence of any one of SEQ ID NOS: 293, 297, 301, 305, 309, or 313.

[0276] Embodiment 14. The fusion protein of any one of Embodiments 1-13, wherein said targeting moiety comprises a (VHH)₂ comprising a first VHH described in Table 3 and a second VHH described in Table 3.

[0277] Embodiment 15. The fusion protein of Embodiment 14, wherein the amino acid sequence of said first VHH is 100% identical to the amino acid sequence of said second VHH.

[0278] Embodiment 16. The fusion protein of any one of Embodiments 14-15, wherein said first (VHH)₂ comprises a CDR1, CDR2, and CDR3 of a VHH that is described in Table 3; and said second (VHH)₂ comprises a CDR1, CDR2, and CDR3 of a VHH that is described in Table 3.

[0279] Embodiment 17. The fusion protein of any one of Embodiments 14-16, wherein said first (VHH)₂ comprises a CDR1 that comprises the amino acid sequence of SEQ ID NO: 290, 294, 298, 302, 306, or 310, or the amino acid sequence of SEQ ID NO: 290, 294, 298, 302, 306, or 310 with 1, 2, or 3 amino acid modifications (e.g., a substitution, deletion, or addition); a CDR2 that comprises the amino acid sequence of SEQ ID NO: 291, 295, 299, 303, 307, or 311, or the amino acid sequence of SEQ ID NO: 291, 295, 299, 303, 307, or 311 with 1, 2, or 3 amino acid modifications (e.g., a substitution, deletion, or addition); and/or a CDR3 that comprises the amino acid sequence of SEQ ID NO: 292, 296, 300, 304, 308, or 312 or the amino acid sequence of SEQ ID NO: 292, 296, 300, 304, 308, or 312 with 1, 2, or 3 amino acid modifications (e.g., a substitution, deletion, or addition); and said first (VHH)₂ comprises a CDR1 that comprises the amino acid sequence of SEQ ID NO: 290, 294, 298, 302, 306, or 310, or the amino acid sequence of SEQ ID NO: 290, 294, 298, 302, 306, or 310 with 1, 2, or 3 amino acid modifications (e.g., a substitution, deletion, or addition); a CDR2 that comprises the amino acid sequence of SEQ ID NO: 291, 295, 299, 303, 307, or 311, or the amino acid sequence of SEQ ID NO: 291, 295, 299, 303, 307, or 311 with 1, 2, or 3 amino acid modifications (e.g., a substitution, deletion, or addition); and/or a CDR3 that comprises the amino acid sequence of SEQ ID NO: 292, 296, 300, 304, 308, or 312 or the amino acid sequence of SEQ ID NO: 292, 296, 300, 304, 308, or 312 with 1, 2, or 3 amino acid modifications (e.g., a substitution, deletion, or addition).

[0280] Embodiment 18. The fusion protein of any one of Embodiments 14-17, wherein said first (VHH)₂ comprises an amino acid sequence at least 80%, 81%, 82%, 83%, 84%, 85%, 86%, 87%, 88%, 89%, 90%, 95%, 96%, 97%, 98%, 99%, or 100% identical to the amino acid sequence of a VHH that is described in Table 3; and said second (VHH)₂ comprises an amino acid sequence at least 80%, 81%, 82%, 83%, 84%, 85%, 86%, 87%, 88%, 89%, 90%, 95%, 96%, 97%, 98%, 99%, or 100% identical to the amino acid sequence of a VHH that is described in Table 3.

[0281] Embodiment 19. The fusion protein of any one of Embodiments 14-18, wherein said first (VHH)₂ comprises an amino acid sequence at least 80%, 81%, 82%, 83%, 84%, 85%, 86%, 87%, 88%, 89%, 90%, 95%, 96%, 97%, 98%, 99%, or 100% identical to the amino acid sequence of any one of SEQ ID NOS: 293, 297, 301, 305, 309, or 313; and said second (VHH)₂ comprises an amino acid sequence at least 80%, 81%, 82%, 83%, 84%, 85%, 86%, 87%, 88%, 89%, 90%, 95%, 96%, 97%, 98%, 99%, or 100% identical to the amino acid sequence of any one of SEQ ID NOS: 293, 297, 301, 305, 309, or 313.

[0282] Embodiment 21. The fusion protein of any one of Embodiments 1-19, wherein said effector moiety comprising a functional fragment of a human deubiquitinase that is capable of mediating deubiquitination that comprises an amino acid sequence at least 80%, 81%, 82%, 83%, 84%, 85%, 86%, 87%, 88%, 89%, 90%, 95%, 96%, 97%, 98%, 99%, or 100% identical to the amino acid sequence of SEQ ID NO: 286, and a targeting moiety; and said targeting moiety comprises an amino acid sequence at least 80%, 81%, 82%, 83%, 84%, 85%, 86%, 87%, 88%, 89%, 90%, 95%, 96%, 97%, 98%, 99%, or 100% identical to the amino acid sequence of any one of SEQ ID NOS: 293, 297, 301, 305, 309, 313, or 314-319.

[0283] Embodiment 20. The fusion protein of any one of Embodiments 1-19, comprising an amino acid sequence at least 80%, 81%, 82%, 83%, 84%, 85%, 86%, 87%, 88%, 89%, 90%, 95%, 96%, 97%, 98%, 99%, or 100% identical to the amino acid sequence of any one of SEQ ID NOS: 320-367.

### 5.3.5 Methods of Making Fusion Proteins

[0284] Fusion proteins described herein can be made by any conventional technique known in the art, for example, recombinant techniques or chemical synthesis (e.g., solid phase peptide synthesis). In some embodiments, the fusion protein is made through recombinant expression in a cell (e.g., a eukaryotic cell, e.g., a mammalian cell). Briefly, the fusion protein can be made by synthesizing the DNA encoding the fusion protein and cloning the DNA into any suitable expression vector. Numerous cloning vectors are known to those of skill in the art, and the selection of an appropriate cloning vector is a matter of choice. The gene can be placed under the control of a promoter, ribosome binding site (for bacterial expression) and, optionally, an operator and/or one or more enhancer elements, so that the DNA sequence encoding the fusion protein is transcribed into RNA in the host cell transformed by a vector containing this expression construction. The coding sequence may or may not contain a signal peptide or leader sequence. Heterologous leader sequences can be added to the coding sequence that causes the secretion of the expressed polypeptide from the host organism. Other regulatory sequences may also be desirable which allow for regulation of expression of the protein sequences relative to the growth of the host cell. Such regulatory sequences are known to those of skill in the art, and examples include those which cause the expression of a gene to be turned on or off in response to a chemical or physical stimulus, including the presence of a regulatory compound. Other types of regulatory elements may also be present in the vector, for example, enhancer sequences. The control sequences and other regulatory sequences may be ligated to the coding sequence prior to insertion into a vector, such as the cloning vectors described above. Alternatively, the coding sequence can be cloned directly into an expression vector which already contains the control sequences and an appropriate restriction site.

[0285] The expression vector may then be used to transform an appropriate host cell. A number of mammalian cell lines are known in the art and include immortalized cell lines available from the American Type Culture Collection (ATCC), such as, but not limited to, Chinese hamster ovary (CHO) cells, CHO-suspension cells (CHO-S), HeLa cells, HEK293, baby hamster kidney (BHK) cells, monkey kidney cells (COS), VERO, HepG2, MadinDarby bovine kidney (MDBK) cells, NOS, U2OS, A549, HT1080, CAD, P19, NIH3T3, L929, N2a, MCF-7, Y79, SO-Rb50, DUKX-X11, and J558L.

[0286] Depending on the expression system and host selected, the fusion protein is produced by growing host cells transformed by an expression vector described above under conditions whereby the fusion protein is expressed. The fusion protein is then isolated from the host cells and purified. If the expression system secretes the fusion protein into growth media, the fusion protein can be purified directly from the media. If the fusion protein is not secreted, it is isolated from cell lysates. The selection of the appropriate growth conditions and recovery methods are within the skill of the art. Once purified, the amino acid sequences of the fusion proteins can be determined, i.e., by repetitive cycles of Edman degradation, followed by amino acid analysis by HPLC. Other methods of amino acid sequencing are also known in the art. Once purified, the functionality of the fusion protein can be assessed, e.g., as described herein, e.g., utilizing a bifunctional ELISA.

[0287] As described above, functionality of the fusion protein can be tested by any method known in the art. Each functionality can be measured in a separate assay. For example, binding of the targeting domain to the target protein can be measure using an enzyme linked immunosorbent assay (ELISA). Catalytic activity of the effector domain can be measured using any standard deubiquitinase activity assay known in the art. For example, BioVision Deubiquitinase Activity Assay Kit (Fluorometric) Catalog #K485-100 according to the manufacturer's instructions. The deubiquitinase activity of a fusion protein described herein can be measured for example by using a fluorescent deubiquitinase substrate to detect deubiquitinase activity upon cleavage of the fluorescent substrate. The deubiquitinase activity can also be measured according to the materials and methods set forth in the Examples provided herein.

### 5.4 Nucleic Acids, Host Cells, Vectors, and Viral Particles

[0288] In one aspect, provided herein are nucleic acid molecules encoding a fusion protein described herein. In some embodiments, the nucleic acid molecule is a DNA molecule. In some embodiments, the nucleic acid molecule is an RNA molecule. In some embodiments, the nucleic acid molecule contains at least one modified nucleic acid (e.g., that increases stability of the nucleic acid molecule), e.g., phosphorothioate, N6-methyladenosine (m6A), N6,2′-O-dimethyladenosine (m6Am), 8-oxo-7,8-dihydroguanosine (8-oxoG), pseudouridine (Ψ), 5-methylcytidine (m5C), and N4-acetylcytidine (ac4C).

[0289] In one aspect, provided herein is a host cell (or population of host cells) comprising a nucleic acid encoding a fusion protein described herein. In some embodiments, the nucleic acid is incorporated into the genome of the host cell. In some embodiments, the nucleic acid is not incorporated into the genome of the host cell. In some embodiments, the nucleic acid is present in the cell episomally. In some embodiments, the host cell is a human cell. In some embodiments, the host cell is a mammalian cell. In some embodiments, the host cell is a mouse, rat, hamster, guinea pig, cat, dog, or human cell. In some embodiments, the host cell is modified in vitro, ex vivo, or in vivo.

[0290] The nucleic acid can be introduced into the host cell by any suitable method known in the art (e.g., as described herein). For example, a viral delivery system (e.g., a retrovirus, an adenovirus, an adeno associated virus, a herpes virus, a lentivirus, a pox virus, a vaccinia virus, a vesicular stomatitis virus, a polio virus, a Newcastle's Disease virus, an Epstein-Barr virus, an influenza virus, a reoviruses, a myxoma virus, a maraba virus, a rhabdovirus, or a coxsackie virus delivery system) can be utilized to deliver a nucleic acid (e.g., DNA or RNA molecule) encoding the fusion protein for expression with the host cell. In some embodiments, the nucleic acid encoding the fusion protein is present episomally within the host cell. In some embodiments, the nucleic acid encoding the fusion protein is incorporated into the genome of the host cell. In some embodiments, the virus replication competent. In some embodiments, the virus is replication deficient.

[0291] In some embodiments, a nucleic acid (DNA or RNA) is delivered to the host cell using a non-viral vector (e.g., a plasmid) encoding the fusion protein. In some embodiments, the nucleic acid encoding the fusion protein is present episomally within the host cell. In some embodiments, the nucleic acid encoding the fusion protein is incorporated into the genome of the host cell. Exemplary non-viral transfection methods known in the art include, but are not limited to, direct delivery of DNA such as by ex vivo transfection, by injection (e.g., microinjection), electroporation, liposome mediated transfection, receptor-mediated transfection, microprojectile bombardment, by agitation with silicon carbide fibers Through the application of techniques such as these cells may be stably or transiently transfected with a nucleic acid encoding a fusion protein described herein to express the encoded fusion protein.

[0292] In one aspect, provided herein are vectors comprising a nucleic acid encoding a fusion protein described herein (e.g., a nucleic acid described herein). In some embodiments, the vector is a viral vector. Exemplary viral vectors include, but are not limited to, retroviral vectors, adenoviral vectors, adeno associated viral vectors, herpes viral vectors, lentiviral vectors, pox viral vectors, vaccinia viral vectors, vesicular stomatitis viral vectors, polio viral vectors, Newcastle's Disease viral vectors, Epstein-Barr viral vectors, influenza viral vectors, reovirus vectors, myxoma viral vectors, maraba viral vectors, rhabdoviral vectors, and coxsackie viral vectors. In some embodiments, the vector is a non-viral vector. In some embodiments, the non-viral vector is a plasmid.

[0293] In one aspect, provided herein is a viral particle (or population of viral particles) that comprise a nucleic acid encoding a fusion protein described herein (e.g., a nucleic acid described herein). In some embodiments, the viral particle is an RNA virus. In some embodiments, the viral particle is a DNA virus. In some embodiments, the viral particle comprises a double stranded genome. In some embodiments, the viral particle comprises a single stranded genome. Exemplary viral particles include, but are not limited to, a retrovirus, an adenovirus, an adeno associated virus, a herpes virus, a lentivirus, a pox virus, a vaccinia virus, a vesicular stomatitis virus, a polio virus, a Newcastle's Disease virus, an Epstein-Barr virus, an influenza virus, a reoviruses, a myxoma virus, a maraba virus, a rhabdovirus, or a coxsackie.

### 5.5 Pharmaceutical Compositions

[0294] In one aspect, provided herein are pharmaceutical compositions comprising 1) a fusion protein described herein, a nucleic acid encoding a fusion protein described herein, a vector comprising a nucleic acid encoding a fusion protein described herein, or a viral particle comprising a nucleic acid encoding a fusion protein described herein; and 2) at least one pharmaceutically acceptable carrier, excipient, stabilizer buffer, diluent, surfactant, preservative and/or adjuvant, etc (see, e.g., Remington's Pharmaceutical Sciences (1990) Mack Publishing Co., Easton, PA). A person of ordinary skill in the art can select suitable excipient for inclusion in the pharmaceutical composition. For example, the formulation of the pharmaceutical composition may differ based on the route of administration (e.g., intravenous, subcutaneous, etc.), and/or the active molecule contained within the pharmaceutical composition (e.g., a viral particle, a non-viral vector, a nucleic acid not contained within a vector).

[0295] Acceptable carriers, excipients, or stabilizers are preferably nontoxic to recipients at the dosages and concentrations employed, and include buffers such as phosphate, citrate, or other organic acids; antioxidants including ascorbic acid or methionine; preservatives (such as octadecyldimethylbenzyl ammonium chloride; hexamethonium chloride; benzalkonium chloride, benzethonium chloride; phenol, butyl or benzyl alcohol; alkyl parabens such as methyl or propyl paraben; catechol; resorcinol; cyclohexanol; 3-pentanol; or m-cresol); low molecular weight (less than about 10 residues) polypeptides; proteins, such as serum albumin, gelatin, or immunoglobulins; hydrophilic polymers such as polyvinylpyrrolidone; amino acids such as glycine, glutamine, asparagine, histidine, arginine, or lysine; monosaccharides, disaccharides, or other carbohydrates including glucose, mannose, or dextrins; chelating agents such as EDTA; sugars such as sucrose, mannitol, trehalose or sorbitol; salt-forming counter-ions such as sodium; metal complexes (e.g., Zn-protein complexes); and/or non-ionic surfactants such as TWEEN™, PLURONICS™ or polyethylene glycol (PEG).

[0296] In one embodiment, the present disclosure provides a pharmaceutical composition comprising a fusion protein described herein for use as a medicament. In another embodiment, the disclosure provides a pharmaceutical composition for use in a method for the treatment of cancer. In some embodiments, pharmaceutical compositions comprise a fusion protein disclosed herein, and optionally one or more additional prophylactic or therapeutic agents, in a pharmaceutically acceptable carrier.

[0297] A pharmaceutical composition may be formulated for any route of administration to a subject. Specific examples of routes of administration include parenteral administration (e.g., intravenous, subcutaneous, intramuscular). In some embodiments, the pharmaceutical composition is formulated for intravenous administration. In some embodiments, the pharmaceutical composition is formulated for subcutaneous administration. Injectables can be prepared in conventional forms, either as liquid solutions or suspensions. The injectables can contain one or more excipients. Exemplary excipients include, for example, water, saline, dextrose, glycerol or ethanol. In addition, if desired, the pharmaceutical compositions to be administered can also contain minor amounts of non-toxic auxiliary substances such as wetting or emulsifying agents, pH buffering agents, stabilizers, solubility enhancers, or other such agents, such as for example, sodium acetate, sorbitan monolaurate, triethanolamine oleate or cyclodextrins.

[0298] In some embodiments, the pharmaceutical composition is formulated for intravenous administration. Suitable carriers for intravenous administration include physiological saline or phosphate buffered saline (PBS), or solutions containing thickening or solubilizing agents, such as glucose, polyethylene glycol, or polypropylene glycol or mixtures thereof.

[0299] The compositions to be used for in vivo administration can be sterile. This is readily accomplished by filtration through, e.g., sterile filtration membranes.

[0300] Pharmaceutically acceptable carriers used in the parenteral preparations described herein include for example, aqueous vehicles, nonaqueous vehicles, antimicrobial agents, isotonic agents, buffers, antioxidants, local anesthetics, suspending and dispersing agents, emulsifying agents, sequestering or chelating agents or other pharmaceutically acceptable substances. Examples of aqueous vehicles, which can be incorporated in one or more of the formulations described herein, include sodium chloride injection, Ringer's injection, isotonic dextrose injection, sterile water injection, dextrose or lactated Ringer's injection. Nonaqueous parenteral vehicles, which can be incorporated in one or more of the formulations described herein, include fixed oils of vegetable origin, cottonseed oil, corn oil, sesame oil or peanut oil. Antimicrobial agents in bacteriostatic or fungistatic concentrations can be added to the parenteral preparations described herein and packaged in multiple-dose containers, which include phenols or cresols, mercurials, benzyl alcohol, chlorobutanol, methyl and propyl p-hydroxybenzoic acid esters, thimerosal, benzalkonium chloride or benzethonium chloride. Isotonic agents, which can be incorporated in one or more of the formulations described herein, include sodium chloride or dextrose. Buffers, which can be incorporated in one or more of the formulations described herein, include phosphate or citrate. Antioxidants, which can be incorporated in one or more of the formulations described herein, include sodium bisulfate. Local anesthetics, which can be incorporated in one or more of the formulations described herein, include procaine hydrochloride. Suspending and dispersing agents, which can be incorporated in one or more of the formulations described herein, include sodium carboxymethylcelluose, hydroxypropyl methylcellulose or polyvinylpyrrolidone. Emulsifying agents, which can be incorporated in one or more of the formulations described herein, include Polysorbate 80 (TWEEN® 80). A sequestering or chelating agent of metal ions, which can be incorporated in one or more of the formulations described herein, is EDTA. Pharmaceutical carriers, which can be incorporated in one or more of the formulations described herein, also include ethyl alcohol, polyethylene glycol or propylene glycol for water miscible vehicles; orsodium hydroxide, hydrochloric acid, citric acid or lactic acid for pH adjustment.

[0301] The precise dose to be employed in a pharmaceutical composition will also depend on the route of administration, and the seriousness of the condition caused by it, and should be decided according to the judgment of the practitioner and each subject's circumstances. For example, effective doses may also vary depending upon means of administration, target site, physiological state of the subject (including age, body weight, and health), other medications administered, or whether therapy is prophylactic or therapeutic. Therapeutic dosages are preferably titrated to optimize safety and efficacy.

### 5.6 Methods of Therapeutic Use

[0302] In one aspect, provided herein are methods of treating a disease in a subject by administering to the subject having the disease a fusion protein described herein, a nucleic acid encoding a fusion protein described herein, a vector comprising a nucleic acid encoding a fusion protein described herein, or a viral particle comprising a nucleic acid encoding a fusion protein described herein.

[0303] The fusion protein can be delivered to host cells via any method known in the art. For example, a viral delivery system (e.g., a retrovirus, an adenovirus, an adeno associated virus, a herpes virus, a lentivirus, a pox virus, a vaccinia virus, a vesicular stomatitis virus, a polio virus, a Newcastle's Disease virus, an Epstein-Barr virus, an influenza virus, a reoviruses, a myxoma virus, a maraba virus, a rhabdovirus, an enadenotucirev or a coxsackie) can be utilized to deliver a nucleic acid (e.g., DNA or RNA molecule) encoding the fusion protein for expression within a population of cells of a subject. In some embodiments, the nucleic acid encoding the fusion protein is present episomally within the population of cells of the subject. In some embodiments, the nucleic acid encoding the fusion protein is incorporated into the genome of the population of cells of the subject. In some embodiments, the virus is replication competent. In some embodiments, the virus is replication deficient.

[0304] In some embodiments, the fusion protein is administered to the subject. In some embodiments, a nucleic acid (DNA or RNA) is administered to the subject. In some embodiments, the nucleic acid (DNA or RNA) is complexed within a carrier (e.g., a nanoparticle, a liposome, a microsphere). In some embodiments, a nucleic acid (DNA or RNA) within a non-viral vector (e.g., a plasmid) encoding the fusion protein is administered to the subject.

### 5.6.1 Administration

[0305] The fusion protein can be delivered to host cells via any method known in the art. For example, a viral delivery system (e.g., a retrovirus, an adenovirus, an adeno associated virus, a herpes virus, a lentivirus, a pox virus, a vaccinia virus, a vesicular stomatitis virus, a polio virus, a Newcastle's Disease virus, an Epstein-Barr virus, an influenza virus, a reoviruses, a myxoma virus, a maraba virus, a rhabdovirus, an enadenotucirev or a coxsackie) can be utilized to deliver a nucleic acid (e.g., DNA or RNA molecule) encoding the fusion protein for expression within a population of cells of a subject. In some embodiments, the nucleic acid encoding the fusion protein is present episomally within the population of cells of the subject. In some embodiments, the nucleic acid encoding the fusion protein is incorporated into the genome of the population of cells of the subject. In some embodiments, the virus is replication competent. In some embodiments, the virus is replication deficient.

[0306] In some embodiments, the fusion protein is administered to the subject. In some embodiments, a nucleic acid (DNA or RNA) is administered to the subject. In some embodiments, the nucleic acid (DNA or RNA) is complexed within a carrier (e.g., a nanoparticle, a liposome, a microsphere). In some embodiments, a nucleic acid (DNA or RNA) within a non-viral vector (e.g., a plasmid) encoding the fusion protein is administered to the subject.

[0307] In some embodiment, the fusion protein is administered parenterally. In some embodiments, the fusion protein is administered via intravenous, intramuscular, intraarterial, intrathecal, intralymphatic, intralesional, intracapsular, intraorbital, intracardiac, intradermal, intraperitoneal, transtracheal, subcutaneous, subcuticular, intraarticular, subcapsular, subarachnoid, intraspinal, epidural or intrasternal injection or infusion. In some embodiments, the fusion protein is intravenously administered. In some embodiments, the fusion protein is subcutaneously administered. In some embodiments, the fusion protein is administered via a non-parenteral route, or orally. Other non-parenteral routes include a topical, epidermal or mucosal route of administration, for example, intranasally, vaginally, rectally, sublingually or topically. Administering can also be performed, for example, once, a plurality of times, and/or over one or more extended periods.

[0308] In some embodiments, the methods disclosed herein are used in place of standard of care therapies. In certain embodiments, a standard of care therapy is used in combination with any method disclosed herein. In some embodiments, the methods disclosed herein are used after standard of care therapy has failed. In some embodiments, the fusion protein is co-administered, administered prior to, or administered after, an additional therapeutic agent. In some embodiments, the disease is a genetic disease.

### 5.6.2 Exemplary Genetic Diseases

[0309] In some embodiments, the disease is associated with decreased expression of a functional target cytosolic protein. In some embodiments, the disease is associated with decreased stability of a functional target cytosolic protein. In some embodiments, the disease is associated with increased ubiquitination of a target cytosolic protein. In some embodiments, the disease is associated with increased ubiquitination and degradation of a target cytosolic protein. In some embodiments, the disease is a haploinsufficiency disease.

[0310] In some embodiments, the disease is a genetic disease. In some embodiments, the genetic disease is associated with decreased expression of a functional target cytosolic protein. In some embodiments, the genetic disease is associated with decreased stability of a functional target cytosolic protein. In some embodiments, the genetic disease is associated with increased ubiquitination of a target cytosolic protein. In some embodiments, the genetic disease is associated with increased ubiquitination and degradation of a target cytosolic protein. In some embodiments, the genetic disease is a haploinsufficiency disease.

[0311] In some embodiments, the disease is an epileptic encephalopathy. In some embodiments, the epileptic encephalopathy is an early infantile epileptic encephalopathy. In some embodiments, the early infantile epileptic encephalopathy is early infantile epileptic encephalopathy type 4, or early infantile epileptic encephalopathy type 4.

[0312] In some embodiments, the disease is SYNGAP1 encephalopathy, CDKL5 deficiency disorder, STXBP1 encephalopathy early, early infantile epileptic encephalopathy type 2, Wilson disease, early infantile epileptic encephalopathy type 4, Mental retardation, autosomal dominant 5, aphasia, primary progressive & FTD (frontotemporal degeneration), alagille syndrome 1, Epilepsy, familial focal, with variable foci 1, Tuberous sclerosis-2, Tuberous sclerosis-1, KIF1A-associated neurological disorder, encephalopathy, Phelan-McDermid syndrome, Becker Muscular Dystrophy, RP1, retinitis pigmentosa 1, dilated cardiomyopathy 1G, DYNC1H1 Syndrome, TRIO-Related intellectual disability (ID), or USP9X development disorder.

[0313] In some embodiments, the target cytosolic protein is SYNGAP1, and the disease is SYNGAP1 encephalopathy. In some embodiments, the target cytosolic protein is SYNGAP1, and the disease is Mental retardation, autosomal dominant 5. In some embodiments, the target cytosolic protein is CDKL5, and the disease is CDKL5 deficiency disorder. In some embodiments, the target cytosolic protein is CDKL5, and the disease is an early infantile epileptic encephalopathy. In some embodiments, the target cytosolic protein is CDKL5, and the disease is early infantile epileptic encephalopathy type 2. In some embodiments, the target cytosolic protein is ATP7B, and the disease is Wilson disease. In some embodiments, the target cytosolic protein is STXBP1, and the disease is STXBP1 encephalopathy. In some embodiments, the target cytosolic protein is STXBP1, and the disease is an early infantile epileptic encephalopathy. In some embodiments, the target cytosolic protein is STXBP1, and the disease is early infantile epileptic encephalopathy type 4. In some embodiments, the target cytosolic protein is GRN, and the disease is aphasia, primary progressive & FTD (frontotemporal degeneration). In some embodiments, the target cytosolic protein is JAG1, and the disease is alagille syndrome 1. In some embodiments, the target cytosolic protein is DEPDC5, and the disease is epilepsy (e.g., familial focal, with variable foci 1). In some embodiments, the target cytosolic protein is TSC2, and the disease is tuberous sclerosis. In some embodiments, the target cytosolic protein is TSC2, and the disease is tuberous sclerosis type 2. In some embodiments, the target cytosolic protein is TSC2, and the disease is tuberous sclerosis type 1. In some embodiments, the target cytosolic protein is TSC1, and the disease is tuberous sclerosis. In some embodiments, the target cytosolic protein is TSC1, and the disease is tuberous sclerosis type 1. In some embodiments, the target cytosolic protein is TSC1, and the disease is tuberous sclerosis type 2. In some embodiments, the target cytosolic protein is KIF1A, and the disease is KIF1A-associated neurological disorder. In some embodiments, the target cytosolic protein is DNM1, and the disease is a DNM1 encephalopathy. In some embodiments, the target cytosolic protein is DNM1, and the disease is encephalopathy. In some embodiments, the target cytosolic protein is SHANK3, and the disease is Phelan-McDermid syndrome. In some embodiments, the target cytosolic protein is DMD, and the disease is Becker Muscular Dystrophy. In some embodiments, the target cytosolic protein is RP1, and the disease is retinitis pigmentosa 1. In some embodiments, the target cytosolic protein is TTN, and the disease is dilated cardiomyopathy 1G. In some embodiments, the target cytosolic protein is DYNC1H1, and the disease is DYNC1H1 Syndrome. In some embodiments, the target cytosolic protein is TRIO, and the disease is TRIO-Related intellectual disability (ID). In some embodiments, the target cytosolic protein is USP9X, and the disease is USP9X development disorder. In some embodiments, the target cytosolic protein is CSTB, and the disease is epilepsy, progressive myoclonic 1 (EPM1). In some embodiments, the target cytosolic protein is PCBD1, and the disease is hyperphenylalaninemia, BH4-deficient, D (HPABH4D).

### 5.7 Kits

[0314] In one aspect, provided herein are kits comprising a fusion protein described herein, a nucleic acid encoding a fusion protein described herein, a vector comprising a nucleic acid encoding a fusion protein described herein, or a viral particle comprising a nucleic acid encoding a fusion protein described herein, for therapeutic uses. Kits typically include a label indicating the intended use of the contents of the kit and instructions for use. The term label includes any writing, or recorded material supplied on or with the kit, or which otherwise accompanies the kit. Accordingly, this disclosure provides a kit for treating a subject afflicted with a disease (e.g., a genetic disease), the kit comprising: (a) a dosage of a fusion protein, a nucleic acid encoding a fusion protein described herein, a vector comprising a nucleic acid encoding a fusion protein described herein, or a viral particle comprising a nucleic acid encoding a fusion described herein; and (b) instructions for using the fusion protein in any of the therapy methods disclosed herein.

### 6. EXAMPLES

[0315] The present invention is further illustrated by the following examples which should not be construed as further limiting.

### 6.1 Example 1. Generation of Targeted Engineered Deubiquitinases

[0316] This example provides general experimental methods of using fluorescent tagged target proteins together with fluorophore tagged engineered deubiquitinases (enDUBs) to demonstrate up-regulation of expression in the context of an enDUB. For illustrative purposes the constructs disclosed below will be synthesized in a suitable vector for mammalian expression. Generally, the target protein will be expressed with a C-terminal YFP followed by a P2A cleavage signal and an mCherry protein as a second reporter (Target protein-YFP-P2A-mCherry). This construct will be co-transfected in the presence of a trifunctional fusion protein comprising of a CFP protein followed by a P2A signal and a nanobody specifically binding to YPF followed by the engineered DUB (CFP-P2A-Anti-YFPnanobody-enDUB). In applications for drug treatment the targeting nanobodies (or other specific binders) will be directed to the wild type (or disease-causing mutant) protein in the cell to be upregulated while the enDUB is fused to a binding protein directed to the target protein. Target protein binding moieties could be any antibody or antibody fragments, nanobodies, or any other non-antibody scaffold such as fibronectins, anticalins, ankyrin repeats or natural binding proteins interacting specifically with the target protein to be upregulated. The amino acid sequence of the components of the test fusion proteins is provided in Table 7 below.

TABLE 7
Amino Acid Sequence of Components of test fusion proteins

| | | |
|---|---|---|
| Description | SEQ ID NO | Amino Acid Sequence |

Target Proteins

| | | |
|---|---|---|
| LCK kinase | 239 | MGCGCSSHPEDDWMENIDVCENCHYPIVPLDGKGTLLIRNGSEVRD |
| | | PLVTYEGSNPPASPLQDNLVIALHSYEPSHDGDLGFEKGEQLRILE |
| | | QSGEWWKAQSLTTGQEGFIPFNFVAKANSLEPEPWEEKNLSRKDAE |
| | | RQLLAPGNTHGSFLIRESESTAGSFSLSVRDFDQNQGEVVKHYKIR |
| | | NLDNGGFYISPRITEPGLHELVRHYTNASDGLCTRLSRPCQTQKPQ |
| | | KPWWEDEWEVPRETLKLVERLGAGQFGEVWMGYYNGHTKVAVKSLK |
| | | QGSMSPDAFLAEANLMKQLQHQRLVRLYAVVTQEPIYIITEYMENG |
| | | SLVDFLKTPSGIKLTINKLLDMAAQIAEGMAFIEERNYIHRDLRAA |
| | | NILVSDTLSCKIADFGLARLIEDNEYTAREGAKFPIKWTAPEAINY |
| | | GTFTIKSDVWSFGILLTEIVTHGRIPYPGMTNPEVIQNLERGYRMV |
| | | RPDNCPEELYQLMRLCWKERPEDRPTEDYLRSVLEDFFTATEGQYQ |
| | | PQP |
| YES1 kinase | 240 | MGCIKSKENKSPAIKYRPENTPEPVSTSVSHYGAEPTTVSPCPSSS |
| | | AKGTAVNFSSLSMTPFGGSSGVTPFGGASSSFSVVPSSYPAGLTGG |
| | | VTIFVALYDYEARTTEDLSFKKGERFQIINNTEGDWWEARSIATGK |
| | | NGYIPSNYVAPADSIQAEEWYFGKMGRKDAERLLLNPGNQRGIFLV |
| | | RESETTKGAYSLSIRDWDEIRGDNVKHYKIRKLDNGGYYITTRAQF |
| | | DTLQKLVKHYTEHADGLCHKLTTVCPTVKPQTQGLAKDAWEIPRES |
| | | LRLEVKLGQGCFGEVWMGTWNGTTKVAIKTLKPGTMMPEAFLQEAQ |
| | | IMKKLRHDKLVPLYAVVSEEPIYIVTEFMSKGSLLDELKEGDGKYL |
| | | KLPQLVDMAAQIADGMAYIERMNYIHRDLRAANILVGENLVCKIAD |
| | | FGLARLIEDNEYTARQGAKFPIKWTAPEAALYGRFTIKSDVWSFGI |
| | | LQTELVTKGRVPYPGMVNREVLEQVERGYRMPCPQGCPESLHELMN |
| | | LCWKKDPDERPTFEYIQSFLEDYFTATEPQYQPGENL |
| Aurora kinase A | 241 | MDRSKENCISGPVKATAPVGGPKRVLVTQQFPCQNPLPVNSGQAQR |
| | | VLCPSNSSQRVPLQAQKLVSSHKPVQNQKQKQLQATSVPHPVSRPL |
| | | NNTQKSKQPLPSAPENNPEEELASKQKNEESKKRQWALEDFEIGRP |
| | | LGKGKFGNVYLAREKQSKFILALKVLFKAQLEKAGVEHQLRREVEI |
| | | QSHLRHPNILRLYGYFHDATRVYLILEYAPLGTVYRELQKLSKEDE |
| | | QRTATYITELANALSYCHSKRVIHRDIKPENLLLGSAGELKIADFG |
| | | WSVHAPSSRRTTLCGTLDYLPPEMIEGRMHDEKVDLWSLGVLCYEF |
| | | LVGKPPFEANTYQETYKRISRVEFTFPDFVTEGARDLISRLLKHNP |
| | | SQRPMLREVLEHPWITANSSKPSNCQNKESASKQS |

Fluorescent Proteins

| | | |
|---|---|---|
| YFP | 242 | VSKGEELFTGVVPILVELDGDVNGHKESVSGEGEGDATYGKLTLKF |
| | | ICTTGKLPVPWPTLVTTFGYGLQCFARYPDHMKQHDFFKSAMPEGY |
| | | VQERTIFFKDDGNYKTRAEVKFEGDTLVNRIELKGIDFKEDGNILG |
| | | HKLEYNYNSHNVYIMADKQKNGIKVNFKIRHNIEDGSVQLADHYQQ |
| | | NTPIGDGPVLLPDNHYLSYQSALSKDPNEKRDHMVLLEFVTAAGIT |
| | | LGMDELYK |
| mCherry | 243 | MVSKGEEDNMAIIKEFMRFKVHMEGSVNGHEFEIEGEGEGRPYEGT |
| | | QTAKLKVTKGGPLPFAWDILSPQFMYGSKAYVKHPADIPDYLKLSF |
| | | PEGFKWERVMNFEDGGVVTVTQDSSLQDGEFIYKVKLRGTNFPSDG |
| | | PVMQKKTMGWEASSERMYPEDGALKGEIKQRLKLKDGGHYDAEVKT |
| | | TYKAKKPVQLPGAYNVNIKLDITSHNEDYTIVEQYERAEGRHSTGG |
| | | MDELYK |
| CFP | 244 | MVSKGEELFTGVVPILVELDGDVNGHKFSVSGEGEGDATYGKLTLK |
| | | FICTTGKLPVPWPTLVTTLTWGVQCESRYPDHMKQHDFFKSAMPEG |
| | | YVQERTIFFKDDGNYKTRAEVKFEGDTLVNRIELKGIDFKEDGNIL |
| | | GHKLEYNYISHNVYITADKQKNGIKANFKIRHNIEDGSVQLADHYQ |
| | | QNTPIGDGPVLLPDNHYLSTQSALSKDPNEKRDHMVLLEFVTAAGI |
| | | TLGMDELYK |

A2 Peptides

| | | |
|---|---|---|
| P2A | 245 | GSGATNFSLLKQAGDVEENPGP |
| T2A | 246 | GSGEGRGSLLTCGDVEENPGP |
| E2A | 247 | GSGQCTNYALLKLAGDVESNPGP |

Target Binders

| | | |
|---|---|---|
| YFP targeting | 248 | QVQLVESGGALVQPGGSLRLSCAASGEPVNRYSMRWYRQAPGKERE |
| nanobody | | WVAGMSSAGDRSSYEDSVKGRFTISRDDARNTVYLQMNSLKPEDTA |
| | | VYYCNVNVGFEYWGQGTQVTVSS |
| LCK binder | 249 | GSVSSVPTKLEVVAATPTSLLISWDAPAVTVDFYHITYGETGGNSP |
| (monobody) | | VQEFTVPGSKSTATISGLKPGVDYTITVYAYVSYPEYYFPSPISIN |
| | | YRT |
| YES1 Kinase | 250 | GSVSSVPTKLEVVAATPTSLLISWDAPAVTVDYYFITYGETGGNSP |
| binder | | VQEFTVPGSKSTATISGLKPGVDYTITVYAWYYYDDEYYMNESSPI |
| (monobody) | | SINYRT |
| Aurora kinase A | 251 | GSVSSVPTKLEVVAATPTSLLISWDAPAVTVVHYVITYGETGGNSP |
| binder | | VQEFTVPGSKSTATISGLKPGVDYTITVYAIDFYWGSYSPISINYR |
| (monobody) | | T |
| EnDUBS | | |
| Cezanne | 252 | PPSFSEGSGGSRTPEKGFSDREPTRPPRPILQRQDDIVQEKRLSRG |
| | | ISHASSSIVSLARSHVSSNGGGGGSNEHPLEMPICAFQLPDLTVYN |
| | | EDERSFIERDLIEQSMLVALEQAGRLNWWVSVDPTSQRLLPLATTG |
| | | DGNCLLHAASLGMWGFHDRDLMLRKALYALMEKGVEKEALKRRWRW |
| | | QQTQQNKESGLVYTEDEWQKEWNELIKLASSEPRMHLGTNGANCGG |
| | | VESSEEPVYESLEEFHVFVLAHVLRRPIVVVADTMLRDSGGEAFAP |
| | | IPFGGIYLPLEVPASQCHRSPLVLAYDQAHFSALVSMEQKENTKEQ |
| | | AVIPLTDSEYKLLPLHFAVDPGKGWEWGKDDSDNVRLASVILSLEV |
| | | KLHLLHSYMNVKWIPLSSDAQAPLAQ |
| OTUD1 | 253 | DEKLALYLAEVEKQDKYLRQRNKYRFHIIPDGNCLYRAVSKTVYGD |
| | | QSLHRELREQTVHYIADHLDHFSPLIEGDVGEFIIAAAQDGAWAGY |
| | | PELLAMGQMLNVNIHLTTGGRLESPTVSTMIHYLGPEDSLRPSIWL |
| | | SWLSNGHYDAVEDHSYPNPEYDNWCKQTQVQRKRDEELAKSMAISL |
| | | SKMYIEQNACS |
| TRABID | 254 | LEVDFKKLKQIKNRMKKTDWLFLNACVGVVEGDLAAIEAYKSSGGD |
| | | IARQLTADEVRLLNRPSAFDVGYTLVHLAIRFQRQDMLAILLTEVS |
| | | QQAAKCIPAMVCPELTEQIRREIAASLHQRKGDFACYFLTDLVTFT |
| | | LPADIEDLPPTVQEKLEDEVLDRDVQKELEEESPIINWSLELATRL |
| | | DSRLYALWNRTAGDCLLDSVLQATWGIYDKDSVLRKALHDSLHDCS |
| | | HWFYTRWKDWESWYSQSFGLHESLREEQWQEDWAFILSLASQPGAS |
| | | LEQTHIFVLAHILRRPIIVYGVKYYKSFRGETLGYTRFQGVYLPLL |
| | | WEQSFCWKSPIALGYTRGHFSALVAMENDGYGNRGAGANLNTDDDV |
| | | TITFLPLVDSERKLLHVHELSAQELGNEEQQEKLLREWLDCCVTEG |
| | | GVLVAMQKSSRRRNHPLVTQMVEKWLDRYRQIRPCTSLS |
| USP21 | 255 | SDDKMAHHTLLLGSGHVGLRNLGNTCFLNAVLQCLSSTRPLRDFCL |
| | | RRDFRQEVPGGGRAQELTEAFADVIGALWHPDSCEAVNPTRFRAVE |
| | | QKYVPSFSGYSQQDAQEFLKLLMERLHLEINRRGRRAPPILANGPV |
| | | PSPPRRGGALLEEPELSDDDRANLMWKRYLEREDSKIVDLFVGQLK |
| | | SCLKCQACGYRSTTFEVFCDLSLPIPKKGFAGGKVSLRDCENLFTK |
| | | EEELESENAPVCDRCRQKTRSTKKLTVQRFPRILVLHLNRESASRG |
| | | SIKKSSVGVDFPLQRLSLGDFASDKAGSPVYQLYALCNHSGSVHYG |
| | | HYTALCRCQTGWHVYNDSRVSPVSENQVASSEGYVLFYQLMQEPPR |
| | | CL |
| OTUD4 | 256 | ATPMDAYLRKLGLYRKLVAKDGSCLFRAVAEQVLHSQSRHVEVRMA |
| | | CIHYLRENREKFEAFIEGSFEEYLKRLENPQEWVGQVEISALSLMY |
| | | RKDFIIYREPNVSPSQVTENNFPEKVLLCESNGNHYDIVYPIKYKE |
| | | SSAMCQSLLYELLYEKVEKTDVSKIVMELDTLEVADE |
| Human USP3 | 257 | MECPHLSSSVCIAPDSAKFPNGSPSSWCCSVCRSNKSPWVCLTCSS |
| (full length) | | VHCGRYVNGHAKKHYEDAQVPLTNHKKSEKQDKVQHTVCMDCSSYS |
| nuclear located | | TYCYRCDDFVVNDTKLGLVQKVREHLQNLENSAFTADRHKKRKLLE |
| | | NSTLNSKLLKVNGSTTAICATGLRNLGNTCEMNAILQSLSNIEQFC |
| | | CYFKELPAVELRNGKTAGRRTYHTRSQGDNNVSLVEEFRKTLCALW |
| | | QGSQTAFSPESLFYVVWKIMPNERGYQQQDAHEFMRYLLDHLHLEL |
| | | QGGFNGVSRSAILQENSTLSASNKCCINGASTVVTAIFGGILQNEV |
| | | NCLICGTESRKFDPELDLSLDIPSQFRSKRSKNQENGPVCSLRDCL |
| | | RSFTDLEELDETELYMCHKCKKKQKSTKKFWIQKLPKVLCLHLKRE |
| | | HWTAYLRNKVDTYVEFPLRGLDMKCYLLEPENSGPESCLYDLAAVV |
| | | VHHGSGVGSGHYTAYATHEGRWFHENDSTVTLTDEETVVKAKAYIL |
| | | FYVEHQAKAGSDKL |

[0317] The amino acid sequence of the test fusion proteins is provided in Table 8 below.

TABLE 8
Amino acid sequence of exemplary test fusion proteins

| | SEQ | |
|---|---|---|
| | ID | |
| Description | NO | Amino Acid Sequence |
| LCK Kinase | 258 | MGCGCSSHPEDDWMENIDVCENCHYPIVPLDGKGTLLIRNGSEVRD |
| Target-YFP- | | PLVTYEGSNPPASPLQDNLVIALHSYEPSHDGDLGFEKGEQLRILE |
| P2A-mCherrry | | QSGEWWKAQSLTTGQEGFIPFNFVAKANSLEPEPWEEKNLSRKDAE |
| | | RQLLAPGNTHGSFLIRESESTAGSFSLSVRDEDQNQGEVVKHYKIR |
| | | NLDNGGFYISPRITFPGLHELVRHYTNASDGLCTRLSRPCQTQKPQ |
| | | KPWWEDEWEVPRETLKLVERLGAGQFGEVWMGYYNGHTKVAVKSLK |
| | | QGSMSPDAFLAEANLMKQLQHQRLVRLYAVVTQEPIYIITEYMENG |
| | | SLVDELKTPSGIKLTINKLLDMAAQIAEGMAFIEERNYIHRDLRAA |
| | | NILVSDTLSCKIADFGLARLIEDNEYTAREGAKFPIKWTAPEAINY |
| | | GTFTIKSDVWSFGILLTEIVTHGRIPYPGMTNPEVIQNLERGYRMV |
| | | RPDNCPEELYQLMRLCWKERPEDRPTFDYLRSVLEDFFTATEGQYQ |
| | | PQPVSKGEELFTGVVPILVELDGDVNGHKESVSGEGEGDATYGKLT |
| | | LKFICTTGKLPVPWPTLVTTFGYGLQCFARYPDHMKQHDFFKSAMP |
| | | EGYVQERTIFFKDDGNYKTRAEVKFEGDTLVNRIELKGIDFKEDGN |
| | | ILGHKLEYNYNSHNVYIMADKQKNGIKVNFKIRHNIEDGSVQLADH |
| | | YQQNTPIGDGPVLLPDNHYLSYQSALSKDPNEKRDHMVLLEFVTAA |
| | | GITLGMDELYKGSGATNFSLLKQAGDVEENPGPMVSKGEEDNMAII |
| | | KEFMRFKVHMEGSVNGHEFEIEGEGEGRPYEGTQTAKLKVTKGGPL |
| | | PFAWDILSPQFMYGSKAYVKHPADIPDYLKLSFPEGEKWERVMNFE |
| | | DGGVVTVTQDSSLQDGEFIYKVKLRGTNFPSDGPVMQKKTMGWEAS |
| | | SERMYPEDGALKGEIKQRLKLKDGGHYDAEVKTTYKAKKPVQLPGA |
| | | YNVNIKLDITSHNEDYTIVEQYERAEGRHSTGGMDELYK |
| YES1 Kinase | 259 | MGCIKSKENKSPAIKYRPENTPEPVSTSVSHYGAEPTTVSPCPSSS |
| Target-YFP- | | AKGTAVNFSSLSMTPFGGSSGVTPFGGASSSFSVVPSSYPAGLTGG |
| P2A-mCherrry | | VTIFVALYDYEARTTEDLSFKKGERFQIINNTEGDWWEARSIATGK |
| | | NGYIPSNYVAPADSIQAEEWYFGKMGRKDAERLLLNPGNQRGIFLV |
| | | RESETTKGAYSLSIRDWDEIRGDNVKHYKIRKLDNGGYYITTRAQF |
| | | DTLQKLVKHYTEHADGLCHKLTTVCPTVKPQTQGLAKDAWEIPRES |
| | | LRLEVKLGQGCFGEVWMGTWNGTTKVAIKTLKPGTMMPEAFLQEAQ |
| | | IMKKLRHDKLVPLYAVVSEEPIYIVTEFMSKGSLLDELKEGDGKYL |
| | | KLPQLVDMAAQIADGMAYIERMNYIHRDLRAANILVGENLVCKIAD |
| | | FGLARLIEDNEYTARQGAKFPIKWTAPEAALYGRFTIKSDVWSFGI |
| | | LQTELVTKGRVPYPGMVNREVLEQVERGYRMPCPQGCPESLHELMN |
| | | LCWKKDPDERPTFEYIQSFLEDYFTATEPQYQPGENLVSKGEELFT |
| | | GVVPILVELDGDVNGHKFSVSGEGEGDATYGKLTLKFICTTGKLPV |
| | | PWPTLVTTFGYGLQCFARYPDHMKQHDFFKSAMPEGYVQERTIFFK |
| | | DDGNYKTRAEVKFEGDTLVNRIELKGIDFKEDGNILGHKLEYNYNS |
| | | HNVYIMADKQKNGIKVNFKIRHNIEDGSVQLADHYQQNTPIGDGPV |
| | | LLPDNHYLSYQSALSKDPNEKRDHMVLLEFVTAAGITLGMDELYKG |
| | | SGATNFSLLKQAGDVEENPGPMVSKGEEDNMAIIKEFMRFKVHMEG |
| | | SVNGHEFEIEGEGEGRPYEGTQTAKLKVTKGGPLPFAWDILSPQEM |
| | | YGSKAYVKHPADIPDYLKLSFPEGFKWERVMNFEDGGVVTVTQDSS |
| | | LQDGEFIYKVKLRGTNFPSDGPVMQKKTMGWEASSERMYPEDGALK |
| | | GEIKQRLKLKDGGHYDAEVKTTYKAKKPVQLPGAYNVNIKLDITSH |
| | | NEDYTIVEQYERAEGRHSTGGMDELYK |
| Aurora Kinase | 260 | MDRSKENCISGPVKATAPVGGPKRVLVTQQFPCQNPLPVNSGQAQR |
| A Target-YFP- | | VLCPSNSSQRVPLQAQKLVSSHKPVQNQKQKQLQATSVPHPVSRPL |
| P2A-mCherrry | | NNTQKSKQPLPSAPENNPEEELASKQKNEESKKRQWALEDFEIGRP |
| | | LGKGKFGNVYLAREKQSKFILALKVLFKAQLEKAGVEHQLRREVEI |
| | | QSHLRHPNILRLYGYFHDATRVYLILEYAPLGTVYRELQKLSKEDE |
| | | QRTATYITELANALSYCHSKRVIHRDIKPENLLLGSAGELKIADFG |
| | | WSVHAPSSRRTTLCGTLDYLPPEMIEGRMHDEKVDLWSLGVLCYEF |
| | | LVGKPPFEANTYQETYKRISRVEFTFPDFVTEGARDLISRLLKHNP |
| | | SQRPMLREVLEHPWITANSSKPSNCQNKESASKQSVSKGEELFTGV |
| | | VPILVELDGDVNGHKFSVSGEGEGDATYGKLTLKFICTTGKLPVPW |
| | | PTLVTTFGYGLQCFARYPDHMKQHDFFKSAMPEGYVQERTIFFKDD |
| | | GNYKTRAEVKFEGDTLVNRIELKGIDFKEDGNILGHKLEYNYNSHN |
| | | VYIMADKQKNGIKVNFKIRHNIEDGSVQLADHYQQNTPIGDGPVLL |
| | | PDNHYLSYQSALSKDPNEKRDHMVLLEFVTAAGITLGMDELYKGSG |
| | | ATNFSLLKQAGDVEENPGPMVSKGEEDNMAIIKEFMRFKVHMEGSV |
| | | NGHEFEIEGEGEGRPYEGTQTAKLKVTKGGPLPFAWDILSPQFMYG |
| | | SKAYVKHPADIPDYLKLSFPEGFKWERVMNFEDGGVVTVTQDSSLQ |
| | | DGEFIYKVKLRGTNFPSDGPVMQKKTMGWEASSERMYPEDGALKGE |
| | | IKQRLKLKDGGHYDAEVKTTYKAKKPVQLPGAYNVNIKLDITSHNE |
| | | DYTIVEQYERAEGRHSTGGMDELYK |
| CFP-P2A- | 261 | MVSKGEELFTGVVPILVELDGDVNGHKFSVSGEGEGDATYGKLTLK |
| Cezanne enDUB | | FICTTGKLPVPWPTLVTTLTWGVQCFSRYPDHMKQHDFFKSAMPEG |
| | | YVQERTIFFKDDGNYKTRAEVKFEGDTLVNRIELKGIDFKEDGNIL |
| | | GHKLEYNYISHNVYITADKQKNGIKANFKIRHNIEDGSVQLADHYQ |
| | | QNTPIGDGPVLLPDNHYLSTQSALSKDPNEKRDHMVLLEFVTAAGI |
| | | TLGMDELYKGSGATNFSLLKQAGDVEENPGPPPSFSEGSGGSRTPE |
| | | KGFSDREPTRPPRPILQRQDDIVQEKRLSRGISHASSSIVSLARSH |
| | | VSSNGGGGGSNEHPLEMPICAFQLPDLTVYNEDERSFIERDLIEQS |
| | | MLVALEQAGRLNWWVSVDPTSQRLLPLATTGDGNCLLHAASLGMWG |
| | | FHDRDLMLRKALYALMEKGVEKEALKRRWRWQQTQQNKESGLVYTE |
| | | DEWQKEWNELIKLASSEPRMHLGTNGANCGGVESSEEPVYESLEEF |
| | | HVFVLAHVLRRPIVVVADTMLRDSGGEAFAPIPEGGIYLPLEVPAS |
| | | QCHRSPLVLAYDQAHFSALVSMEQKENTKEQAVIPLTDSEYKLLPL |
| | | HFAVDPGKGWEWGKDDSDNVRLASVILSLEVKLHLLHSYMNVKWIP |
| | | LSSDAQAPLAQ |
| CFP-P2A- | 262 | MVSKGEELFTGVVPILVELDGDVNGHKFSVSGEGEGDATYGKLTLK |
| OTUD1 enDUB | | FICTTGKLPVPWPTLVTTLTWGVQCFSRYPDHMKQHDEFKSAMPEG |
| | | YVQERTIFFKDDGNYKTRAEVKFEGDTLVNRIELKGIDFKEDGNIL |
| | | GHKLEYNYISHNVYITADKQKNGIKANFKIRHNIEDGSVQLADHYQ |
| | | QNTPIGDGPVLLPDNHYLSTQSALSKDPNEKRDHMVLLEFVTAAGI |
| | | TLGMDELYKGSGATNFSLLKQAGDVEENPGPDEKLALYLAEVEKQD |
| | | KYLRQRNKYRFHIIPDGNCLYRAVSKTVYGDQSLHRELREQTVHYI |
| | | ADHLDHESPLIEGDVGEFIIAAAQDGAWAGYPELLAMGQMLNVNIH |
| | | LTTGGRLESPTVSTMIHYLGPEDSLRPSIWLSWLSNGHYDAVEDHS |
| | | YPNPEYDNWCKQTQVQRKRDEELAKSMAISLSKMYIEQNACS |
| CFP-P2A- | 263 | MVSKGEELFTGVVPILVELDGDVNGHKESVSGEGEGDATYGKLTLK |
| TRABID | | FICTTGKLPVPWPTLVTTLTWGVQCFSRYPDHMKQHDFFKSAMPEG |
| enDUB | | YVQERTIFFKDDGNYKTRAEVKFEGDTLVNRIELKGIDFKEDGNIL |
| | | GHKLEYNYISHNVYITADKQKNGIKANFKIRHNIEDGSVQLADHYQ |
| | | QNTPIGDGPVLLPDNHYLSTQSALSKDPNEKRDHMVLLEFVTAAGI |
| | | TLGMDELYKGSGATNFSLLKQAGDVEENPGPLEVDEKKLKQIKNRM |
| | | KKTDWLFLNACVGVVEGDLAAIEAYKSSGGDIARQLTADEVRLLNR |
| | | PSAFDVGYTLVHLAIRFQRQDMLAILLTEVSQQAAKCIPAMVCPEL |
| | | TEQIRREIAASLHQRKGDFACYFLTDLVTFTLPADIEDLPPTVQEK |
| | | LFDEVLDRDVQKELEEESPIINWSLELATRLDSRLYALWNRTAGDC |
| | | LLDSVLQATWGIYDKDSVLRKALHDSLHDCSHWFYTRWKDWESWYS |
| | | QSFGLHESLREEQWQEDWAFILSLASQPGASLEQTHIFVLAHILRR |
| | | PIIVYGVKYYKSFRGETLGYTRFQGVYLPLLWEQSFCWKSPIALGY |
| | | TRGHFSALVAMENDGYGNRGAGANLNTDDDVTITFLPLVDSERKLL |
| | | HVHELSAQELGNEEQQEKLLREWLDCCVTEGGVLVAMQKSSRRRNH |
| | | PLVTQMVEKWLDRYRQIRPCTSLS |
| CFP-P2A- | 264 | MVSKGEELFTGVVPILVELDGDVNGHKFSVSGEGEGDATYGKLTLK |
| USP21 enDUB | | FICTTGKLPVPWPTLVTTLTWGVQCFSRYPDHMKQHDFFKSAMPEG |
| | | YVQERTIFFKDDGNYKTRAEVKFEGDTLVNRIELKGIDFKEDGNIL |
| | | GHKLEYNYISHNVYITADKQKNGIKANFKIRHNIEDGSVQLADHYQ |
| | | QNTPIGDGPVLLPDNHYLSTQSALSKDPNEKRDHMVLLEFVTAAGI |
| | | TLGMDELYKGSGATNFSLLKQAGDVEENPGPSDDKMAHHTLLLGSG |
| | | HVGLRNLGNTCFLNAVLQCLSSTRPLRDFCLRRDERQEVPGGGRAQ |
| | | ELTEAFADVIGALWHPDSCEAVNPTRFRAVFQKYVPSESGYSQQDA |
| | | QEFLKLLMERLHLEINRRGRRAPPILANGPVPSPPRRGGALLEEPE |
| | | LSDDDRANLMWKRYLEREDSKIVDLFVGQLKSCLKCQACGYRSTTE |
| | | EVFCDLSLPIPKKGFAGGKVSLRDCENLFTKEEELESENAPVCDRC |
| | | RQKTRSTKKLTVQRFPRILVLHLNRFSASRGSIKKSSVGVDEPLQR |
| | | LSLGDFASDKAGSPVYQLYALCNHSGSVHYGHYTALCRCQTGWHVY |
| | | NDSRVSPVSENQVASSEGYVLFYQLMQEPPRCL |
| CFP-P2A- | 265 | MVSKGEELFTGVVPILVELDGDVNGHKFSVSGEGEGDATYGKLTLK |
| OTUD4 enDUB | | FICTTGKLPVPWPTLVTTLTWGVQCFSRYPDHMKQHDFFKSAMPEG |
| | | YVQERTIFFKDDGNYKTRAEVKFEGDTLVNRIELKGIDFKEDGNIL |
| | | GHKLEYNYISHNVYITADKQKNGIKANFKIRHNIEDGSVQLADHYQ |
| | | QNTPIGDGPVLLPDNHYLSTQSALSKDPNEKRDHMVLLEFVTAAGI |
| | | TLGMDELYKGSGATNFSLLKQAGDVEENPGPATPMDAYLRKLGLYR |
| | | KLVAKDGSCLFRAVAEQVLHSQSRHVEVRMACIHYLRENREKFEAF |
| | | IEGSFEEYLKRLENPQEWVGQVEISALSLMYRKDFIIYREPNVSPS |
| | | QVTENNFPEKVLLCFSNGNHYDIVYPIKYKESSAMCQSLLYELLYE |
| | | KVFKTDVSKIVMELDTLEVADE |
| CFP-P2A-a- | 266 | MVSKGEELFTGVVPILVELDGDVNGHKFSVSGEGEGDATYGKLTLK |
| YFPnanobody- | | FICTTGKLPVPWPTLVTTLTWGVQCFSRYPDHMKQHDFFKSAMPEG |
| Cezanne enDUB | | YVQERTIFFKDDGNYKTRAEVKFEGDTLVNRIELKGIDFKEDGNIL |
| | | GHKLEYNYISHNVYITADKQKNGIKANFKIRHNIEDGSVQLADHYQ |
| | | QNTPIGDGPVLLPDNHYLSTQSALSKDPNEKRDHMVLLEFVTAAGI |
| | | TLGMDELYKGSGATNFSLLKQAGDVEENPGPQVQLVESGGALVQPG |
| | | GSLRLSCAASGFPVNRYSMRWYRQAPGKEREWVAGMSSAGDRSSYE |
| | | DSVKGRFTISRDDARNTVYLQMNSLKPEDTAVYYCNVNVGFEYWGQ |
| | | GTQVTVSSPPSFSEGSGGSRTPEKGFSDREPTRPPRPILQRQDDIV |
| | | QEKRLSRGISHASSSIVSLARSHVSSNGGGGGSNEHPLEMPICAFQ |
| | | LPDLTVYNEDERSFIERDLIEQSMLVALEQAGRLNWWVSVDPTSQR |
| | | LLPLATTGDGNCLLHAASLGMWGFHDRDLMLRKALYALMEKGVEKE |
| | | ALKRRWRWQQTQQNKESGLVYTEDEWQKEWNELIKLASSEPRMHLG |
| | | TNGANCGGVESSEEPVYESLEEFHVFVLAHVLRRPIVVVADTMLRD |
| | | SGGEAFAPIPFGGIYLPLEVPASQCHRSPLVLAYDQAHFSALVSME |
| | | QKENTKEQAVIPLTDSEYKLLPLHFAVDPGKGWEWGKDDSDNVRLA |
| | | SVILSLEVKLHLLHSYMNVKWIPLSSDAQAPLAQ |
| CFP-P2A-a- | 267 | MVSKGEELFTGVVPILVELDGDVNGHKFSVSGEGEGDATYGKLTLK |
| YFPnanobody- | | FICTTGKLPVPWPTLVTTLTWGVQCFSRYPDHMKQHDFFKSAMPEG |
| OTUD1 enDUB | | YVQERTIFFKDDGNYKTRAEVKFEGDTLVNRIELKGIDFKEDGNIL |
| | | GHKLEYNYISHNVYITADKQKNGIKANFKIRHNIEDGSVQLADHYQ |
| | | QNTPIGDGPVLLPDNHYLSTQSALSKDPNEKRDHMVLLEFVTAAGI |
| | | TLGMDELYKGSGATNESLLKQAGDVEENPGPQVQLVESGGALVQPG |
| | | GSLRLSCAASGFPVNRYSMRWYRQAPGKEREWVAGMSSAGDRSSYE |
| | | DSVKGRFTISRDDARNTVYLQMNSLKPEDTAVYYCNVNVGFEYWGQ |
| | | GTQVTVSSDEKLALYLAEVEKQDKYLRQRNKYRFHIIPDGNCLYRA |
| | | VSKTVYGDQSLHRELREQTVHYIADHLDHFSPLIEGDVGEFIIAAA |
| | | QDGAWAGYPELLAMGQMLNVNIHLTTGGRLESPTVSTMIHYLGPED |
| | | SLRPSIWLSWLSNGHYDAVEDHSYPNPEYDNWCKQTQVQRKRDEEL |
| | | AKSMAISLSKMYIEQNACS |
| CFP-P2A-a- | 268 | MVSKGEELFTGVVPILVELDGDVNGHKESVSGEGEGDATYGKLTLK |
| YFPnanobody- | | FICTTGKLPVPWPTLVTTLTWGVQCFSRYPDHMKQHDFFKSAMPEG |
| TRABID | | YVQERTIFFKDDGNYKTRAEVKFEGDTLVNRIELKGIDFKEDGNIL |
| enDUB | | GHKLEYNYISHNVYITADKQKNGIKANFKIRHNIEDGSVQLADHYQ |
| | | QNTPIGDGPVLLPDNHYLSTQSALSKDPNEKRDHMVLLEFVTAAGI |
| | | TLGMDELYKGSGATNESLLKQAGDVEENPGPQVQLVESGGALVQPG |
| | | GSLRLSCAASGFPVNRYSMRWYRQAPGKEREWVAGMSSAGDRSSYE |
| | | DSVKGRFTISRDDARNTVYLQMNSLKPEDTAVYYCNVNVGFEYWGQ |
| | | GTQVTVSSLEVDFKKLKQIKNRMKKTDWLFLNACVGVVEGDLAAIE |
| | | AYKSSGGDIARQLTADEVRLLNRPSAFDVGYTLVHLAIRFQRQDML |
| | | AILLTEVSQQAAKCIPAMVCPELTEQIRREIAASLHQRKGDFACYF |
| | | LTDLVTFTLPADIEDLPPTVQEKLFDEVLDRDVQKELEEESPIINW |
| | | SLELATRLDSRLYALWNRTAGDCLLDSVLQATWGIYDKDSVLRKAL |
| | | HDSLHDCSHWFYTRWKDWESWYSQSFGLHESLREEQWQEDWAFILS |
| | | LASQPGASLEQTHIFVLAHILRRPIIVYGVKYYKSFRGETLGYTRE |
| | | QGVYLPLLWEQSFCWKSPIALGYTRGHFSALVAMENDGYGNRGAGA |
| | | NLNTDDDVTITFLPLVDSERKLLHVHELSAQELGNEEQQEKLLREW |
| | | LDCCVTEGGVLVAMQKSSRRRNHPLVTQMVEKWLDRYRQIRPCTSL |
| CFP-P2A-a- | 269 | MVSKGEELFTGVVPILVELDGDVNGHKFSVSGEGEGDATYGKLTLK |
| YFPnanobody- | | FICTTGKLPVPWPTLVTTLTWGVQCFSRYPDHMKQHDFFKSAMPEG |
| USP21 enDUB | | YVQERTIFFKDDGNYKTRAEVKFEGDTLVNRIELKGIDFKEDGNIL |
| | | GHKLEYNYISHNVYITADKQKNGIKANFKIRHNIEDGSVQLADHYQ |
| | | QNTPIGDGPVLLPDNHYLSTQSALSKDPNEKRDHMVLLEFVTAAGI |
| | | TLGMDELYKGSGATNESLLKQAGDVEENPGPQVQLVESGGALVQPG |
| | | GSLRLSCAASGFPVNRYSMRWYRQAPGKEREWVAGMSSAGDRSSYE |
| | | DSVKGRFTISRDDARNTVYLQMNSLKPEDTAVYYCNVNVGFEYWGQ |
| | | GTQVTVSSSDDKMAHHTLLLGSGHVGLRNLGNTCELNAVLQCLSST |
| | | RPLRDFCLRRDFRQEVPGGGRAQELTEAFADVIGALWHPDSCEAVN |
| | | PTRFRAVFQKYVPSFSGYSQQDAQEFLKLLMERLHLEINRRGRRAP |
| | | PILANGPVPSPPRRGGALLEEPELSDDDRANLMWKRYLEREDSKIV |
| | | DLFVGQLKSCLKCQACGYRSTTFEVECDLSLPIPKKGFAGGKVSLR |
| | | DCFNLFTKEEELESENAPVCDRCRQKTRSTKKLTVQRFPRILVLHL |
| | | NRFSASRGSIKKSSVGVDEPLQRLSLGDFASDKAGSPVYQLYALCN |
| | | HSGSVHYGHYTALCRCQTGWHVYNDSRVSPVSENQVASSEGYVLFY |
| | | QLMQEPPRCL |
| CFP-P2A-a- | 270 | MVSKGEELFTGVVPILVELDGDVNGHKFSVSGEGEGDATYGKLTLK |
| YFPnanobody- | | FICTTGKLPVPWPTLVTTLTWGVQCFSRYPDHMKQHDFFKSAMPEG |
| OTUD4 enDUB | | YVQERTIFFKDDGNYKTRAEVKFEGDTLVNRIELKGIDFKEDGNIL |
| | | GHKLEYNYISHNVYITADKQKNGIKANFKIRHNIEDGSVQLADHYQ |
| | | QNTPIGDGPVLLPDNHYLSTQSALSKDPNEKRDHMVLLEFVTAAGI |
| | | TLGMDELYKGSGATNESLLKQAGDVEENPGPQVQLVESGGALVQPG |
| | | GSLRLSCAASGFPVNRYSMRWYRQAPGKEREWVAGMSSAGDRSSYE |
| | | DSVKGRFTISRDDARNTVYLQMNSLKPEDTAVYYCNVNVGFEYWGQ |
| | | GTQVTVSSATPMDAYLRKLGLYRKLVAKDGSCLFRAVAEQVLHSQS |
| | | RHVEVRMACIHYLRENREKFEAFIEGSFEEYLKRLENPQEWVGQVE |
| | | ISALSLMYRKDFIIYREPNVSPSQVTENNFPEKVLLCESNGNHYDI |
| | | VYPIKYKESSAMCQSLLYELLYEKVEKTDVSKIVMELDTLEVADE |
| CFP-P2A-anti- | 271 | MVSKGEELFTGVVPILVELDGDVNGHKESVSGEGEGDATYGKLTLK |
| LCK Kinase | | FICTTGKLPVPWPTLVTTLTWGVQCFSRYPDHMKQHDFFKSAMPEG |
| targeting | | YVQERTIFFKDDGNYKTRAEVKFEGDTLVNRIELKGIDFKEDGNIL |
| binder-Cezanne | | GHKLEYNYISHNVYITADKQKNGIKANFKIRHNIEDGSVQLADHYQ |
| enDUB | | QNTPIGDGPVLLPDNHYLSTQSALSKDPNEKRDHMVLLEFVTAAGI |
| | | TLGMDELYKGSGATNESLLKQAGDVEENPGPGSVSSVPTKLEVVAA |
| | | TPTSLLISWDAPAVTVLYYLITYGETGDHWSGHQAFEVPGSKSTAT |
| | | ISGLKPGVDYTITVYAHAESYGESYSPISINYRTPPSFSEGSGGSR |
| | | TPEKGFSDREPTRPPRPILQRQDDIVQEKRLSRGISHASSSIVSLA |
| | | RSHVSSNGGGGGSNEHPLEMPICAFQLPDLTVYNEDFRSFIERDLI |
| | | EQSMLVALEQAGRLNWWVSVDPTSQRLLPLATTGDGNCLLHAASLG |
| | | MWGFHDRDLMLRKALYALMEKGVEKEALKRRWRWQQTQQNKESGLV |
| | | YTEDEWQKEWNELIKLASSEPRMHLGTNGANCGGVESSEEPVYESL |
| | | EEFHVFVLAHVLRRPIVVVADTMLRDSGGEAFAPIPEGGIYLPLEV |
| | | PASQCHRSPLVLAYDQAHFSALVSMEQKENTKEQAVIPLTDSEYKL |
| | | LPLHFAVDPGKGWEWGKDDSDNVRLASVILSLEVKLHLLHSYMNVK |
| | | WIPLSSDAQAPLAQ |
| CFP-P2A-anti- | 272 | MVSKGEELFTGVVPILVELDGDVNGHKFSVSGEGEGDATYGKLTLK |
| LCK Kinase | | FICTTGKLPVPWPTLVTTLTWGVQCFSRYPDHMKQHDFFKSAMPEG |
| targeting | | YVQERTIFFKDDGNYKTRAEVKFEGDTLVNRIELKGIDFKEDGNIL |
| binder-OTUD1 | | GHKLEYNYISHNVYITADKQKNGIKANFKIRHNIEDGSVQLADHYQ |
| enDUB | | QNTPIGDGPVLLPDNHYLSTQSALSKDPNEKRDHMVLLEFVTAAGI |
| | | TLGMDELYKGSGATNFSLLKQAGDVEENPGPGSVSSVPTKLEVVAA |
| | | TPTSLLISWDAPAVTVLYYLITYGETGDHWSGHQAFEVPGSKSTAT |
| | | ISGLKPGVDYTITVYAHAESYGESYSPISINYRTDEKLALYLAEVE |
| | | KQDKYLRQRNKYRFHIIPDGNCLYRAVSKTVYGDQSLHRELREQTV |
| | | HYIADHLDHESPLIEGDVGEFIIAAAQDGAWAGYPELLAMGQMLNV |
| | | NIHLTTGGRLESPTVSTMIHYLGPEDSLRPSIWLSWLSNGHYDAVE |
| | | DHSYPNPEYDNWCKQTQVQRKRDEELAKSMAISLSKMYIEQNACS |
| CFP-P2A-anti- | 273 | MVSKGEELFTGVVPILVELDGDVNGHKESVSGEGEGDATYGKLTLK |
| LCK Kinase | | FICTTGKLPVPWPTLVTTLTWGVQCFSRYPDHMKQHDFFKSAMPEG |
| targeting | | YVQERTIFFKDDGNYKTRAEVKFEGDTLVNRIELKGIDFKEDGNIL |
| binder-TRABID | | GHKLEYNYISHNVYITADKQKNGIKANFKIRHNIEDGSVQLADHYQ |
| enDUB | | QNTPIGDGPVLLPDNHYLSTQSALSKDPNEKRDHMVLLEFVTAAGI |
| | | TLGMDELYKGSGATNFSLLKQAGDVEENPGPGSVSSVPTKLEVVAA |
| | | TPTSLLISWDAPAVTVLYYLITYGETGDHWSGHQAFEVPGSKSTAT |
| | | ISGLKPGVDYTITVYAHAESYGESYSPISINYRTLEVDEKKLKQIK |
| | | NRMKKTDWLFLNACVGVVEGDLAAIEAYKSSGGDIARQLTADEVRL |
| | | LNRPSAFDVGYTLVHLAIRFQRQDMLAILLTEVSQQAAKCIPAMVC |
| | | PELTEQIRREIAASLHQRKGDFACYFLTDLVTFTLPADIEDLPPTV |
| | | QEKLFDEVLDRDVQKELEEESPIINWSLELATRLDSRLYALWNRTA |
| | | GDCLLDSVLQATWGIYDKDSVLRKALHDSLHDCSHWFYTRWKDWES |
| | | WYSQSFGLHESLREEQWQEDWAFILSLASQPGASLEQTHIFVLAHI |
| | | LRRPIIVYGVKYYKSFRGETLGYTRFQGVYLPLLWEQSFCWKSPIA |
| | | LGYTRGHESALVAMENDGYGNRGAGANLNTDDDVTITELPLVDSER |
| | | KLLHVHFLSAQELGNEEQQEKLLREWLDCCVTEGGVLVAMQKSSRR |
| | | RNHPLVTQMVEKWLDRYRQIRPCTSLS |
| CFP-P2A-anti- | 274 | MVSKGEELFTGVVPILVELDGDVNGHKESVSGEGEGDATYGKLTLK |
| LCK Kinase | | FICTTGKLPVPWPTLVTTLTWGVQCFSRYPDHMKQHDFFKSAMPEG |
| targeting | | YVQERTIFFKDDGNYKTRAEVKFEGDTLVNRIELKGIDFKEDGNIL |
| binder-USP21 | | GHKLEYNYISHNVYITADKQKNGIKANFKIRHNIEDGSVQLADHYQ |
| enDUB | | QNTPIGDGPVLLPDNHYLSTQSALSKDPNEKRDHMVLLEFVTAAGI |
| | | TLGMDELYKGSGATNE |
| | | GSVSSVPTKLEVVAATPTSLLISWDAPAVTVLYYLITYGETGDHWS |
| | | GHQAFEVPGSKSTATISGLKPGVDYTITVYAHAESYGESYSPISIN |
| | | YRTSDDKMAHHTLLLGSGHVGLRNLGNTCELNAVLQCLSSTRPLRD |
| | | FCLRRDFRQEVPGGGRAQELTEAFADVIGALWHPDSCEAVNPTRER |
| | | AVFQKYVPSFSGYSQQDAQEFLKLLMERLHLEINRRGRRAPPILAN |
| | | GPVPSPPRRGGALLEEPELSDDDRANLMWKRYLEREDSKIVDLFVG |
| | | QLKSCLKCQACGYRSTTFEVECDLSLPIPKKGFAGGKVSLRDCENL |
| | | FTKEEELESENAPVCDRCRQKTRSTKKLTVQRFPRILVLHLNRESA |
| | | SRGSIKKSSVGVDFPLQRLSLGDFASDKAGSPVYQLYALCNHSGSV |
| | | HYGHYTALCRCQTGWHVYNDSRVSPVSENQVASSEGYVLFYQLMQE |
| | | PPRCL |
| CFP-P2A-anti- | 275 | MVSKGEELFTGVVPILVELDGDVNGHKESVSGEGEGDATYGKLTLK |
| LCK Kinase | | FICTTGKLPVPWPTLVTTLTWGVQCFSRYPDHMKQHDFFKSAMPEG |
| targeting | | YVQERTIFFKDDGNYKTRAEVKFEGDTLVNRIELKGIDFKEDGNIL |
| binder-OTUD4 | | GHKLEYNYISHNVYITADKQKNGIKANFKIRHNIEDGSVQLADHYQ |
| enDUB | | QNTPIGDGPVLLPDNHYLSTQSALSKDPNEKRDHMVLLEFVTAAGI |
| | | TLGMDELYKGSGATNFSLLKQAGDVEENPGPGSVSSVPTKLEVVAA |
| | | TPTSLLISWDAPAVTVLYYLITYGETGDHWSGHQAFEVPGSKSTAT |
| | | ISGLKPGVDYTITVYAHAESYGESYSPISINYRTATPMDAYLRKLG |
| | | LYRKLVAKDGSCLFRAVAEQVLHSQSRHVEVRMACIHYLRENREKE |
| | | EAFIEGSFEEYLKRLENPQEWVGQVEISALSLMYRKDFIIYREPNV |
| | | SPSQVTENNFPEKVLLCESNGNHYDIVYPIKYKESSAMCQSLLYEL |
| | | LYEKVFKTDVSKIVMELDTLEVADE |
| CFP-P2A-anti- | 276 | MVSKGEELFTGVVPILVELDGDVNGHKFSVSGEGEGDATYGKLTLK |
| YES1 Kinase | | FICTTGKLPVPWPTLVTTLTWGVQCFSRYPDHMKQHDFFKSAMPEG |
| targeting | | YVQERTIFFKDDGNYKTRAEVKFEGDTLVNRIELKGIDFKEDGNIL |
| binder-Cezanne | | GHKLEYNYISHNVYITADKQKNGIKANFKIRHNIEDGSVQLADHYQ |
| enDUB | | QNTPIGDGPVLLPDNHYLSTQSALSKDPNEKRDHMVLLEFVTAAGI |
| | | TLGMDELYKGSGATNFSLLKQAGDVEENPGPGSVSSVPTKLEVVAA |
| | | TPTSLLISWDAPAVTVDYYFITYGETGGNSPVQEFTVPGSKSTATI |
| | | SGLKPGVDYTITVYAWYYYDDEYYMNESSPISINYRTPPSFSEGSG |
| | | GSRTPEKGESDREPTRPPRPILQRQDDIVQEKRLSRGISHASSSIV |
| | | SLARSHVSSNGGGGGSNEHPLEMPICAFQLPDLTVYNEDERSFIER |
| | | DLIEQSMLVALEQAGRLNWWVSVDPTSQRLLPLATTGDGNCLLHAA |
| | | SLGMWGFHDRDLMLRKALYALMEKGVEKEALKRRWRWQQTQQNKES |
| | | GLVYTEDEWQKEWNELIKLASSEPRMHLGTNGANCGGVESSEEPVY |
| | | ESLEEFHVFVLAHVLRRPIVVVADTMLRDSGGEAFAPIPEGGIYLP |
| | | LEVPASQCHRSPLVLAYDQAHFSALVSMEQKENTKEQAVIPLTDSE |
| | | YKLLPLHFAVDPGKGWEWGKDDSDNVRLASVILSLEVKLHLLHSYM |
| | | NVKWIPLSSDAQAPLAQ |
| CFP-P2A-anti- | 277 | MVSKGEELFTGVVPILVELDGDVNGHKESVSGEGEGDATYGKLTLK |
| YES1 Kinase | | FICTTGKLPVPWPTLVTTLTWGVQCFSRYPDHMKQHDFFKSAMPEG |
| targeting | | YVQERTIFFKDDGNYKTRAEVKFEGDTLVNRIELKGIDFKEDGNIL |
| binder-OTUD1 | | GHKLEYNYISHNVYITADKQKNGIKANFKIRHNIEDGSVQLADHYQ |
| enDUB | | QNTPIGDGPVLLPDNHYLSTQSALSKDPNEKRDHMVLLEFVTAAGI |
| | | TLGMDELYKGSGATNFSLLKQAGDVEENPGPGSVSSVPTKLEVVAA |
| | | TPTSLLISWDAPAVTVDYYFITYGETGGNSPVQEFTVPGSKSTATI |
| | | SGLKPGVDYTITVYAWYYYDDEYYMNESSPISINYRTDEKLALYLA |
| | | EVEKQDKYLRQRNKYRFHIIPDGNCLYRAVSKTVYGDQSLHRELRE |
| | | QTVHYIADHLDHFSPLIEGDVGEFIIAAAQDGAWAGYPELLAMGQM |
| | | LNVNIHLTTGGRLESPTVSTMIHYLGPEDSLRPSIWLSWLSNGHYD |
| | | AVFDHSYPNPEYDNWCKQTQVQRKRDEELAKSMAISLSKMYIEQNA |
| | | CS |
| CFP-P2A-anti- | 278 | MVSKGEELFTGVVPILVELDGDVNGHKFSVSGEGEGDATYGKLTLK |
| YES1 Kinase | | FICTTGKLPVPWPTLVTTLTWGVQCFSRYPDHMKQHDFFKSAMPEG |
| targeting | | YVQERTIFFKDDGNYKTRAEVKFEGDTLVNRIELKGIDFKEDGNIL |
| binder-TRABID | | GHKLEYNYISHNVYITADKQKNGIKANFKIRHNIEDGSVQLADHYQ |
| enDUB | | QNTPIGDGPVLLPDNHYLSTQSALSKDPNEKRDHMVLLEFVTAAGI |
| | | TLGMDELYKGSGATNESLLKQAGDVEENPGPGSVSSVPTKLEVVAA |
| | | TPTSLLISWDAPAVTVDYYFITYGETGGNSPVQEFTVPGSKSTATI |
| | | SGLKPGVDYTITVYAWYYYDDEYYMNESSPISINYRTLEVDFKKLK |
| | | QIKNRMKKTDWLFLNACVGVVEGDLAAIEAYKSSGGDIARQLTADE |
| | | VRLLNRPSAFDVGYTLVHLAIRFQRQDMLAILLTEVSQQAAKCIPA |
| | | MVCPELTEQIRREIAASLHQRKGDFACYFLTDLVTFTLPADIEDLP |
| | | PTVQEKLFDEVLDRDVQKELEEESPIINWSLELATRLDSRLYALWN |
| | | RTAGDCLLDSVLQATWGIYDKDSVLRKALHDSLHDCSHWFYTRWKD |
| | | WESWYSQSFGLHFSLREEQWQEDWAFILSLASQPGASLEQTHIFVL |
| | | AHILRRPIIVYGVKYYKSFRGETLGYTRFQGVYLPLLWEQSFCWKS |
| | | PIALGYTRGHFSALVAMENDGYGNRGAGANLNTDDDVTITELPLVD |
| | | SERKLLHVHELSAQELGNEEQQEKLLREWLDCCVTEGGVLVAMQKS |
| | | SRRRNHPLVTQMVEKWLDRYRQIRPCTSLS |
| CFP-P2A-anti- | 279 | MVSKGEELFTGVVPILVELDGDVNGHKFSVSGEGEGDATYGKLTLK |
| YES1 Kinase | | FICTTGKLPVPWPTLVTTLTWGVQCESRYPDHMKQHDEFKSAMPEG |
| targeting | | YVQERTIFFKDDGNYKTRAEVKFEGDTLVNRIELKGIDFKEDGNIL |
| binder-USP21 | | GHKLEYNYISHNVYITADKQKNGIKANFKIRHNIEDGSVQLADHYQ |
| enDUB | | QNTPIGDGPVLLPDNHYLSTQSALSKDPNEKRDHMVLLEFVTAAGI |
| | | TLGMDELYKGSGATNFSLLKQAGDVEENPGPGSVSSVPTKLEVVAA |
| | | TPTSLLISWDAPAVTVDYYFITYGETGGNSPVQEFTVPGSKSTATI |
| | | SGLKPGVDYTITVYAWYYYDDEYYMNESSPISINYRTSDDKMAHHT |
| | | LLLGSGHVGLRNLGNTCFLNAVLQCLSSTRPLRDFCLRRDERQEVP |
| | | GGGRAQELTEAFADVIGALWHPDSCEAVNPTRFRAVFQKYVPSFSG |
| | | YSQQDAQEFLKLLMERLHLEINRRGRRAPPILANGPVPSPPRRGGA |
| | | LLEEPELSDDDRANLMWKRYLEREDSKIVDLFVGQLKSCLKCQACG |
| | | YRSTTFEVECDLSLPIPKKGFAGGKVSLRDCENLFTKEEELESENA |
| | | PVCDRCRQKTRSTKKLTVQRFPRILVLHLNRFSASRGSIKKSSVGV |
| | | DFPLQRLSLGDFASDKAGSPVYQLYALCNHSGSVHYGHYTALCRCQ |
| | | TGWHVYNDSRVSPVSENQVASSEGYVLFYQLMQEPPRCL |
| CFP-P2A-anti- | 280 | MVSKGEELFTGVVPILVELDGDVNGHKESVSGEGEGDATYGKLTLK |
| YES1 Kinase | | FICTTGKLPVPWPTLVTTLTWGVQCFSRYPDHMKQHDFFKSAMPEG |
| targeting | | YVQERTIFFKDDGNYKTRAEVKFEGDTLVNRIELKGIDFKEDGNIL |
| binder-OTUD4 | | GHKLEYNYISHNVYITADKQKNGIKANFKIRHNIEDGSVQLADHYQ |
| enDUB | | QNTPIGDGPVLLPDNHYLSTQSALSKDPNEKRDHMVLLEFVTAAGI |
| | | TLGMDELYKGSGATNFSLLKQAGDVEENPGPGSVSSVPTKLEVVAA |
| | | TPTSLLISWDAPAVTVDYYFITYGETGGNSPVQEFTVPGSKSTATI |
| | | SGLKPGVDYTITVYAWYYYDDEYYMNESSPISINYRTATPMDAYLR |
| | | KLGLYRKLVAKDGSCLFRAVAEQVLHSQSRHVEVRMACIHYLRENR |
| | | EKFEAFIEGSFEEYLKRLENPQEWVGQVEISALSLMYRKDFIIYRE |
| | | PNVSPSQVTENNFPEKVLLCESNGNHYDIVYPIKYKESSAMCQSLL |
| | | YELLYEKVEKTDVSKIVMELDTLEVADE |
| CFP-P2A-anti- | 281 | MVSKGEELFTGVVPILVELDGDVNGHKESVSGEGEGDATYGKLTLK |
| Aroura Kinase | | FICTTGKLPVPWPTLVTTLTWGVQCFSRYPDHMKQHDFFKSAMPEG |
| A targeting | | YVQERTIFFKDDGNYKTRAEVKFEGDTLVNRIELKGIDFKEDGNIL |
| binder-Cezanne | | GHKLEYNYISHNVYITADKQKNGIKANFKIRHNIEDGSVQLADHYQ |
| enDUB | | QNTPIGDGPVLLPDNHYLSTQSALSKDPNEKRDHMVLLEFVTAAGI |
| | | TLGMDELYKGSGATNFSLLKQAGDVEENPGPGSVSSVPTKLEVVAA |
| | | TPTSLLISWDAPAVTVVHYVITYGETGGNSPVQEFTVPGSKSTATI |
| | | SGLKPGVDYTITVYAIDFYWGSYSPISINYRTPPSFSEGSGGSRTP |
| | | EKGFSDREPTRPPRPILQRQDDIVQEKRLSRGISHASSSIVSLARS |
| | | HVSSNGGGGGSNEHPLEMPICAFQLPDLTVYNEDERSFIERDLIEQ |
| | | SMLVALEQAGRLNWWVSVDPTSQRLLPLATTGDGNCLLHAASLGMW |
| | | GFHDRDLMLRKALYALMEKGVEKEALKRRWRWQQTQQNKESGLVYT |
| | | EDEWQKEWNELIKLASSEPRMHLGTNGANCGGVESSEEPVYESLEE |
| | | FHVFVLAHVLRRPIVVVADTMLRDSGGEAFAPIPEGGIYLPLEVPA |
| | | SQCHRSPLVLAYDQAHFSALVSMEQKENTKEQAVIPLTDSEYKLLP |
| | | LHFAVDPGKGWEWGKDDSDNVRLASVILSLEVKLHLLHSYMNVKWI |
| | | PLSSDAQAPLAQ |
| CFP-P2A-anti- | 282 | MVSKGEELFTGVVPILVELDGDVNGHKFSVSGEGEGDATYGKLTLK |
| Aroura Kinase | | FICTTGKLPVPWPTLVTTLTWGVQCFSRYPDHMKQHDEFKSAMPEG |
| A targeting | | YVQERTIFFKDDGNYKTRAEVKFEGDTLVNRIELKGIDFKEDGNIL |
| binder-OTUD1 | | GHKLEYNYISHNVYITADKQKNGIKANFKIRHNIEDGSVQLADHYQ |
| enDUB | | QNTPIGDGPVLLPDNHYLSTQSALSKDPNEKRDHMVLLEFVTAAGI |
| | | TLGMDELYKGSGATNESLLKQAGDVEENPGPGSVSSVPTKLEVVAA |
| | | TPTSLLISWDAPAVTVVHYVITYGETGGNSPVQEFTVPGSKSTATI |
| | | SGLKPGVDYTITVYAIDFYWGSYSPISINYRTDEKLALYLAEVEKQ |
| | | DKYLRQRNKYRFHIIPDGNCLYRAVSKTVYGDQSLHRELREQTVHY |
| | | IADHLDHFSPLIEGDVGEFIIAAAQDGAWAGYPELLAMGQMLNVNI |
| | | HLTTGGRLESPTVSTMIHYLGPEDSLRPSIWLSWLSNGHYDAVEDH |
| | | SYPNPEYDNWCKQTQVQRKRDEELAKSMAISLSKMYIEQNACS |
| CFP-P2A-anti- | 283 | MVSKGEELFTGVVPILVELDGDVNGHKFSVSGEGEGDATYGKLTLK |
| Aroura Kinase | | FICTTGKLPVPWPTLVTTLTWGVQCFSRYPDHMKQHDFFKSAMPEG |
| A targeting | | YVQERTIFFKDDGNYKTRAEVKFEGDTLVNRIELKGIDFKEDGNIL |
| binder- | | GHKLEYNYISHNVYITADKQKNGIKANFKIRHNIEDGSVQLADHYQ |
| TRABID | | QNTPIGDGPVLLPDNHYLSTQSALSKDPNEKRDHMVLLEFVTAAGI |
| enDUB | | TLGMDELYKGSGATNFSLLKQAGDVEENPGPGSVSSVPTKLEVVAA |
| | | TPTSLLISWDAPAVTVVHYVITYGETGGNSPVQEFTVPGSKSTATI |
| | | SGLKPGVDYTITVYAIDFYWGSYSPISINYRTLEVDEKKLKQIKNR |
| | | MKKTDWLFLNACVGVVEGDLAAIEAYKSSGGDIARQLTADEVRLLN |
| | | RPSAFDVGYTLVHLAIRFQRQDMLAILLTEVSQQAAKCIPAMVCPE |
| | | LTEQIRREIAASLHQRKGDFACYFLTDLVTFTLPADIEDLPPTVQE |
| | | KLFDEVLDRDVQKELEEESPIINWSLELATRLDSRLYALWNRTAGD |
| | | CLLDSVLQATWGIYDKDSVLRKALHDSLHDCSHWFYTRWKDWESWY |
| | | SQSFGLHESLREEQWQEDWAFILSLASQPGASLEQTHIFVLAHILR |
| | | RPIIVYGVKYYKSFRGETLGYTRFQGVYLPLLWEQSFCWKSPIALG |
| | | YTRGHFSALVAMENDGYGNRGAGANLNTDDDVTITELPLVDSERKL |
| | | LHVHELSAQELGNEEQQEKLLREWLDCCVTEGGVLVAMQKSSRRRN |
| | | HPLVTQMVEKWLDRYRQIRPCTSLS |
| CFP-P2A-anti- | 284 | MVSKGEELFTGVVPILVELDGDVNGHKFSVSGEGEGDATYGKLTLK |
| Aroura Kinase | | FICTTGKLPVPWPTLVTTLTWGVQCFSRYPDHMKQHDFFKSAMPEG |
| A targeting | | YVQERTIFFKDDGNYKTRAEVKFEGDTLVNRIELKGIDFKEDGNIL |
| binder-USP21 | | GHKLEYNYISHNVYITADKQKNGIKANFKIRHNIEDGSVQLADHYQ |
| enDUB | | QNTPIGDGPVLLPDNHYLSTQSALSKDPNEKRDHMVLLEFVTAAGI |
| | | TLGMDELYKGSGATNFSLLKQAGDVEENPGPGSVSSVPTKLEVVAA |
| | | TPTSLLISWDAPAVTVVHYVITYGETGGNSPVQEFTVPGSKSTATI |
| | | SGLKPGVDYTITVYAIDFYWGSYSPISINYRTSDDKMAHHTLLLGS |
| | | GHVGLRNLGNTCFLNAVLQCLSSTRPLRDFCLRRDERQEVPGGGRA |
| | | QELTEAFADVIGALWHPDSCEAVNPTRFRAVFQKYVPSFSGYSQQD |
| | | AQEFLKLLMERLHLEINRRGRRAPPILANGPVPSPPRRGGALLEEP |
| | | ELSDDDRANLMWKRYLEREDSKIVDLFVGQLKSCLKCQACGYRSTT |
| | | FEVFCDLSLPIPKKGFAGGKVSLRDCFNLFTKEEELESENAPVCDR |
| | | CRQKTRSTKKLTVQRFPRILVLHLNRFSASRGSIKKSSVGVDFPLQ |
| | | RLSLGDFASDKAGSPVYQLYALCNHSGSVHYGHYTALCRCQTGWHV |
| | | YNDSRVSPVSENQVASSEGYVLFYQLMQEPPRCL |
| CFP-P2A-anti- | 285 | MVSKGEELFTGVVPILVELDGDVNGHKFSVSGEGEGDATYGKLTLK |
| Aroura Kinase | | FICTTGKLPVPWPTLVTTLTWGVQCFSRYPDHMKQHDFFKSAMPEG |
| A targeting | | YVQERTIFFKDDGNYKTRAEVKFEGDTLVNRIELKGIDFKEDGNIL |
| binder-OTUD4 | | GHKLEYNYISHNVYITADKQKNGIKANFKIRHNIEDGSVQLADHYQ |
| enDUB | | QNTPIGDGPVLLPDNHYLSTQSALSKDPNEKRDHMVLLEFVTAAGI |
| | | TLGMDELYKGSGATNFSLLKQAGDVEENPGPGSVSSVPTKLEVVAA |
| | | TPTSLLISWDAPAVTVVHYVITYGETGGNSPVQEFTVPGSKSTATI |
| | | SGLKPGVDYTITVYAIDFYWGSYSPISINYRTATPMDAYLRKLGLY |
| | | RKLVAKDGSCLFRAVAEQVLHSQSRHVEVRMACIHYLRENREKFEA |
| | | FIEGSFEEYLKRLENPQEWVGQVEISALSLMYRKDFIIYREPNVSP |
| | | SQVTENNFPEKVLLCESNGNHYDIVYPIKYKESSAMCQSLLYELLY |
| | | EKVEKTDVSKIVMELDTLEVADE |

### 6.2 Example 2. Testing of Targeted Engineered Deubiquitinases

[0318] To demonstrate upregulation of a target protein in the context of a specific targeting enDUB the following experiments will be performed.

Schematic constructs used:
[0319] Control experiment using non-targeting enDUB fusion
   [0320] Target-YFP-P2A-mCherrry
   [0321] CFP-P2A-enDUB (nontargeting control enDUB)
[0322] Test constructs for up-regulation:
   [0323] Target-YFP-P2A-mCherry
   [0324] CFP-P2A-a-YFPnanobody-enDUB
[0325] Or specific targeting enDUB fusion composed of
   [0326] CFP-P2A-anti-targeting binder-enDUB

[0327] Co-transfection of both plasmids carrying the YFP tagged target protein together with the enDUB fused to a target binding protein into HEK cells will be performed. A control construct carrying the enDUB in the absence of the targeting binder will also be co-transfected together with the labeled target protein. After 24-48 hours the transfected cells will be analyzed by FACS or upregulation over the control. The mCherry signal on the target protein will be used to normalize for transfection efficiency while the CFP signal will be used to normalize for the transfection efficiency of the enDUB constructs. The YFP fused to the target protein is the read-out for target gene expression and will be plotted vs the signal in the control transfection. Relative increase in the YFP fluorescence over control will demonstrate upregulation in the presence of the enDUB.

### 6.3 Example 3. Screening Assay for Testing Fusion Proteins

[0328] The following example describes an assay to analyze the ability of a targeted engineered deubiquitinase (enDub) (e.g., an enDub described herein) to increase expression of a target protein. Generally, the assay involves tagging the target protein with a fluorescent tag (e.g., NanoLuciferase (NLuc)) and an alfa-tag (α-Tag); and tagging a fusion protein of the enDub and an anti-alfa Tag nanobody with a different fluorescent tag (e.g., Firefly Luciferase (FLuc)) through a cleavable linker. The use of two different fluorescent tags enables normalization of the signal to compensate for variation in transfection/expression, as the second fluorescent tag is rapidly cleaved from the enDub-anti-alfa tag fusion protein inside the cell through cleavage of the cleavable linker. FIG. 2 provides a general schematic of the cellular aspects of the assay. The protocol, including materials and methods is described below.

[0329] CHO-K1 cells were digested with 0.25% (w/v) Trypsin-EDTA, at 37° C., for 5 min. Complete medium was added for the CHO-K1 cell cultures to stop the digestion. The CHO-K1 cells were centrifuges at 800 rpm for 5 minutes. After centrifugation, the supernatant was discarded and the CHO-K1 cells were resuspend in 2 mL culture medium and counted. 10\hat{ }6 CHO-K1 cells were electroporated under 440V with 0.5 ug of a plasmid encoding the target protein tagged with NLuc and alfa-tag, and 1 ug of a plasmid encoding a) enDub-anti-alfa tag nanobody-FLuc fusion protein (experimental), b) the enDub (control), or the anti-alfa tag nanobody (control). 5E+4 cells/well were placed in in 24 well plates and cultured for 24h, at 37° C., 5% CO₂. The cells were digested with 0.25% (w/v) Trypsin-EDTA, at 37° C. for 5 min. Complete medium was added to the culture to stop the digestion and the cells were counted for use in NanoGlo® Dual Luciferase® Assay (Promega), which enables detection of FLuc and NLuc® in a single sample. The NanoGlo® Dual Luciferase® Assay was carried out according to manufacturer's instructions (Promega, Nano-Glo® Dual-Luciferase® Reporter Assay Technical Manual #TM426). Briefly, 1E+4 cells/well were placed in 96 well black plates and cultured for 24h, at 37° C., 5% CO₂. The plates were removed from the incubator and allowed to equilibrate to room temperature. The samples were modified as needed to have a starting volume of 80 μl per well. All sample wells were injected with 80 μl of ONE-Glo™ EX Reagent and incubated for 3 minutes. The firefly luminescence was read in all sample wells using a 1-second integration time. All sample wells were injected with 80 μl of NanoDLR™ Stop & Glo® Reagent; and incubated for 5 minutes. The NanoLuc® luminescence of all sample wells was read using a 1-second integration time. The dispensing lines were cleaned according to manufacturer's instructions (Nano-Glo® Dual-Luciferase® Reporter Assay Technical Manual #TM426) and the data analyzed.

[0330] The amino acid sequence of the components of the fusion proteins used in the assay are detailed in Table 9 below.

TABLE 9
Amino acid sequence of components of test fusion proteins

| | | SEQ | |
|---|---|---|---|
| | | ID | |
| Description | | NO | Amino Acid Sequence |
| Fluorescent | NanoLuc | 385 | VFTLEDFVGDWRQTAGYNLDQVLEQGGVSSLFQ |
| Protein | | | NLGVSVTPIQRIVLSGENGLKIDIHVIIPYEGL |
| | | | SGDQMGQIEKIFKVVYPVDDHHFKVILHYGTLV |
| | | | IDGVTPNMIDYFGRPYEGIAVEDGKKITVTGTL |
| | | | WNGNKIIDERLINPDGSLLFRVTINGVTGWRLC |
| | | | ERILA |
| | Firefly | 386 | MEDAKNIKKGPAPFYPLEDGTAGEQLHKAMKRY |
| | Luciferase | | ALVPGTIAFTDAHIEVDITYAEYFEMSVRLAEA |
| | | | MKRYGLNTNHRIVVCSENSLQFFMPVLGALFIG |
| | | | VAVAPANDIYNERELLNSMGISQPTVVFVSKKG |
| | | | LQKILNVQKKLPIIQKIIIMDSKTDYQGFQSMY |
| | | | TFVTSHLPPGFNEYDFVPESEDRDKTIALIMNS |
| | | | SGSTGLPKGVALPHRTACVRESHARDPIFGNQI |
| | | | IPDTAILSVVPFHHGFGMFTTLGYLICGERVVL |
| | | | MYRFEEELFLRSLQDYKIQSALLVPTLESFFAK |
| | | | STLIDKYDLSNLHEIASGGAPLSKEVGEAVAKR |
| | | | FHLPGIRQGYGLTETTSAILITPEGDDKPGAVG |
| | | | KVVPFFEAKVVDLDTGKTLGVNQRGELCVRGPM |
| | | | IMSGYVNNPEATNALIDKDGWLHSGDIAYWDED |
| | | | EHFFIVDRLKSLIKYKGYQVAPAELESILLQHP |
| | | | NIFDAGVAGLPDDDAGELPAAVVVLEHGKTMTE |
| | | | KEIVDYVASQVTTAKKLRGGVVFVDEVPKGLTG |
| | | | KLDARKIREILIKAKKGGKIAVTRLK |
| Alfa Tag | | 387 | PSRLEEELRRRLTEP |
| P2A | | 388 | GSGATNFSLLKQAGDVEENPGP |
| Cezanne (Exemplary | | 389 | PPSFSEGSGGSRTPEKGFSDREPTRPPRPILQR |
| Catalytic Domain) | | | QDDIVQEKRLSRGISHASSSIVSLARSHVSSNG |
| | | | GGGGSNEHPLEMPICAFQLPDLTVYNEDERSFI |
| | | | ERDLIEQSMLVALEQAGRLNWWVSVDPTSQRLL |
| | | | PLATTGDGNCLLHAASLGMWGFHDRDLMLRKAL |
| | | | YALMEKGVEKEALKRRWRWQQTQQNKESGLVYT |
| | | | EDEWQKEWNELIKLASSEPRMHLGTNGANCGGV |
| | | | ESSEEPVYESLEEFHVFVLAHVLRRPIVVVADT |
| | | | MLRDSGGEAFAPIPEGGIYLPLEVPASQCHRSP |
| | | | LVLAYDQAHFSALVSMEQKENTKEQAVIPLTDS |
| | | | EYKLLPLHFAVDPGKGWEWGKDDSDNVRLASVI |
| | | | LSLEVKLHLLHSYMNVKWIPLSSDAQAPLAQ |

[0331] The amino acid sequence of exemplary target fusion proteins comprising a target protein, NLuc, and the alfa tag are detailed in Table 10 below.

TABLE 10
Amino Acid Sequence of exemplary Target
Protein-NLuc-Alfa Tag Fusion Proteins

| | SEQ | |
|---|---|---|
| Test Protein | ID NO | Amino Acid Sequence |
| Shank3-nanoluc- | 390 | MDGPGASAVVVRVGIPDLQQTKCLRLDPAAPVWAAKQRVLCALNH |
| alfa-tag-fusion | | SLQDALNYGLFQPPSRGRAGKELDEERLLQEYPPNLDTPLPYLEF |
| | | RYKRRVYAQNLIDDKQFAKLHTKANLKKEMDYVQLHSTDKVARLL |
| | | DKGLDPNFHDPDSGECPLSLAAQLDNATDLLKVLKNGGAHLDERT |
| | | RDGLTAVHCATRORNAAALTTLLDLGASPDYKDSRGLTPLYHSAL |
| | | GGGDALCCELLLHDHAQLGITDENGWQEIHQACREGHVQHLEHLL |
| | | FYGADMGAQNASGNTALHICALYNQESCARVLLFRGANRDVRNYN |
| | | SQTAFQVAIIAGNFELAEVIKTHKDSDVVPFRETPSYAKRRRLAG |
| | | PSGLASPRPLQRSASDINLKGEAQPAASPGPSLRSLPHQLLLQRL |
| | | QEEKDRDRDADQESNISGPLAGRAGQSKISPSGPGGPGPAPGPGP |
| | | APPAPPAPPPRGPKRKLYSAVPGRKFIAVKAHSPQGEGEIPLHRG |
| | | EAVKVLSIGEGGFWEGTVKGRTGWFPADCVEEVQMRQHDTRPETR |
| | | EDRTKRLFRHYTVGSYDSLTSHSDYVIDDKVAVLQKRDHEGFGFV |
| | | LRGAKAETPIEEFTPTPAFPALQYLESVDVEGVAWRAGLRTGDEL |
| | | IEVNGVNVVKVGHKQVVALIRQGGNRLVMKVVSVTRKPEEDGARR |
| | | RAPPPPKRAPSTTLTLRSKSMTAELEELASIRRRKGEKLDEMLAA |
| | | AAEPTLRPDIADADSRAATVKORPTSRRITPAEISSLFERQGLPG |
| | | PEKLPGSLRKGIPRTKSVGEDEKLASLLEGREPRSTSMQDPVREG |
| | | RGIPPPPQTAPPPPPAPYYFDSGPPPAFSPPPPPGRAYDTVRSSF |
| | | KPGLEARLGAGAAGLYEPGAALGPLPYPERQKRARSMIILQDSAP |
| | | ESGDAPRPPPAATPPERPKRRPRPPGPDSPYANLGAFSASLFAPS |
| | | KPQRRKSPLVKQLQVEDAQERAALAVGSPGPGGGSFAREPSPTHR |
| | | GPRPGGLDYGAGDGPGLAFGGPGPAKDRRLEERRRSTVFLSVGAI |
| | | EGSAPGADLPSLQPSRSIDERLLGTGPTAGRDLLLPSPVSALKPL |
| | | VSGPSLGPSGSTFIHPLTGKPLDPSSPLALALAARERALASQAPS |
| | | RSPTPVHSPDADRPGPLFVDVQARDPERGSLASPAFSPRSPAWIP |
| | | VPARREAEKVPREERKSPEDKKSMILSVLDTSLQRPAGLIVVHAT |
| | | SNGQEPSRLGGAEEERPGTPELAPAPMQSAAVAEPLPSPRAQPPG |
| | | GTPADAGPGQGSSEEEPELVFAVNLPPAQLSSSDEETREELARIG |
| | | LVPPPEEFANGVLLATPLAGPGPSPTTVPSPASGKPSSEPPPAPE |
| | | SAADSGVEEADTRSSSDPHLETTSTISTVSSMSTLSSESGELTDT |
| | | HTSFADGHTELLEKPPVPPKPKLKSPLGKGPVTFRDPLLKQSSDS |
| | | ELMAQQHHAASAGLASAAGPARPRYLFQRRSKLWGDPVESRGLPG |
| | | PEDDKPTVISELSSRLQQLNKDTRSLGEEPVGGLGSLLDPAKKSP |
| | | IAAARLFSSLGELSSISAQRSPGGPGGGASYSVRPSGRYPVARRA |
| | | PSPVKPASLERVEGLGAGAGGAGRPFGLTPPTILKSSSLSIPHEP |
| | | KEVRFVVRSVSARSRSPSPSPLPSPASGPGPGAPGPRRPFQQKPL |
| | | QLWSKFDVGDWLESIHLGEHRDRFEDHEIEGAHLPALTKDDEVEL |
| | | GVTRVGHRMNIERALRQLDGSKVPVFTLEDFVGDWRQTAGYNLDQ |
| | | VLEQGGVSSLFQNLGVSVTPIQRIVLSGENGLKIDIHVIIPYEGL |
| | | SGDQMGQIEKIFKVVYPVDDHHFKVILHYGTLVIDGVTPNMIDYE |
| | | GRPYEGIAVFDGKKITVTGTLWNGNKIIDERLINPDGSLLFRVTI |
| | | NGVTGWRLCERILAGGGGSPSRLEEELRRRLTEP |
| CDKL5-nanoluc- | 391 | MKIPNIGNVMNKFEILGVVGEGAYGVVLKCRHKETHEIVAIKKFK |
| alfa-tag-fusion | | DSEENEEVKETTLRELKMLRTLKQENIVELKEAFRRRGKLYLVFE |
| | | YVEKNMLELLEEMPNGVPPEKVKSYIYQLIKAIHWCHKNDIVHRD |
| | | IKPENLLISHNDVLKLCDFGFARNLSEGNNANYTEYVATRWYRSP |
| | | ELLLGAPYGKSVDMWSVGCILGELSDGQPLFPGESEIDQLFTIQK |
| | | VLGPLPSEQMKLFYSNPRFHGLRFPAVNHPQSLERRYLGILNSVL |
| | | LDLMKNLLKLDPADRYLTEQCLNHPTFQTQRLLDRSPSRSAKRKP |
| | | YHVESSTLSNRNQAGKSTALQSHHRSNSKDIQNLSVGLPRADEGL |
| | | PANESFLNGNLAGASLSPLHTKTYQASSQPGSTSKDLINNNIPHL |
| | | LSPKEAKSKTEFDFNIDPKPSEGPGTKYLKSNSRSQQNRHSFMES |
| | | SQSKAGTLQPNEKQSRHSYIDTIPQSSRSPSYRTKAKSHGALSDS |
| | | KSVSNLSEARAQIAEPSTSRYFPSSCLDLNSPTSPTPTRHSDTRT |
| | | LLSPSGRNNRNEGTLDSRRTTTRHSKTMEELKLPEHMDSSHSHSL |
| | | SAPHESFSYGLGYTSPFSSQQRPHRHSMYVTRDKVRAKGLDGSLS |
| | | IGQGMAARANSLOLLSPQPGEQLPPEMTVARSSVKETSREGTSSF |
| | | HTRQKSEGGVYHDPHSDDGTAPKENRHLYNDPVPRRVGSFYRVPS |
| | | PRPDNSFHENNVSTRVSSLPSESSSGTNHSKRQPAFDPWKSPENI |
| | | SHSEQLKEKEKQGFFRSMKKKKKKSQTVPNSDSPDLLTLQKSIHS |
| | | ASTPSSRPKEWRPEKISDLQTQSQPLKSLRKLLHLSSASNHPASS |
| | | DPRFQPLTAQQTKNSFSEIRIHPLSQASGGSSNIRQEPAPKGRPA |
| | | LQLPGQMDPGWHVSSVTRSATEGPSYSEQLGAKSGPNGHPYNRTN |
| | | RSRMPNLNDLKETALKVPVFTLEDFVGDWRQTAGYNLDQVLEQGG |
| | | VSSLFQNLGVSVTPIQRIVLSGENGLKIDIHVIIPYEGLSGDQMG |
| | | QIEKIFKVVYPVDDHHFKVILHYGTLVIDGVTPNMIDYEGRPYEG |
| | | IAVFDGKKITVTGTLWNGNKIIDERLINPDGSLLFRVTINGVTGW |
| | | RLCERILAGGGGSPSRLEEELRRRLTEP |
| STXBP1-nanoluc- | 392 | MAPIGLKAVVGEKIMHDVIKKVKKKGEWKVLVVDQLSMRMLSSCC |
| alfa-tag-fusion | | KMTDIMTEGITIVEDINKRREPLPSLEAVYLITPSEKSVHSLISD |
| | | FKDPPTAKYRAAHVFFTDSCPDALFNELVKSRAAKVIKTLTEINI |
| | | AFLPYESQVYSLDSADSFQSFYSPHKAQMKNPILERLAEQIATLC |
| | | ATLKEYPAVRYRGEYKDNALLAQLIQDKLDAYKADDPTMGEGPDK |
| | | ARSQLLILDRGFDPSSPVLHELTFQAMSYDLLPIENDVYKYETSG |
| | | IGEARVKEVLLDEDDDLWIALRHKHIAEVSQEVTRSLKDESSSKR |
| | | MNTGEKTTMRDLSQMLKKMPQYQKELSKYSTHLHLAEDCMKHYQG |
| | | TVDKLCRVEQDLAMGTDAEGEKIKDPMRAIVPILLDANVSTYDKI |
| | | RIILLYIFLKNGITEENLNKLIQHAQIPPEDSEIITNMAHLGVPI |
| | | VTDSTLRRRSKPERKERISEQTYQLSRWTPIIKDIMEDTIEDKLD |
| | | TKHYPYISTRSSASFSTTAVSARYGHWHKNKAPGEYRSGPRLIIF |
| | | ILGGVSLNEMRCAYEVTQANGKWEVLIGSTHILTPQKLLDTLKKL |
| | | NKTDEEISSKVPVFTLEDFVGDWRQTAGYNLDOVLEQGGVSSLFQ |
| | | NLGVSVTPIQRIVLSGENGLKIDIHVIIPYEGLSGDQMGQIEKIF |
| | | KVVYPVDDHHFKVILHYGTLVIDGVTPNMIDYFGRPYEGIAVEDG |
| | | KKITVTGTLWNGNKIIDERLINPDGSLLERVTINGVTGWRLCERI |
| | | LAGGGGSPSRLEEELRRRLTEP |
| DNM1-nanoluc- | 393 | MGNRGMEDLIPLVNRLQDAFSAIGQNADLDLPQIAVVGGQSAGKS |
| alfa-tag-fusion | | SVLENFVGRDFLPRGSGIVTRRPLVLQLVNATTEYAEFLHCKGKK |
| | | FTDFEEVRLEIEAETDRVTGINKGISPVPINLRVYSPHVLNLTLV |
| | | DLPGMTKVPVGDQPPDIEFQIRDMLMQFVTKENCLILAVSPANSD |
| | | LANSDALKVAKEVDPQGQRTIGVITKLDLMDEGTDARDVLENKLL |
| | | PLRRGYIGVVNRSQKDIDGKKDITAALAAERKFFLSHPSYRHLAD |
| | | RMGTPYLQKVLNQQLTNHIRDTLPGLRNKLQSQLLSIEKEVEEYK |
| | | NFRPDDPARKTKALLQMVQQFAVDFEKRIEGSGDQIDTYELSGGA |
| | | RINRIFHERFPFELVKMEFDEKELRREISYAIKNIHGIRTGLFTP |
| | | DMAFETIVKKQVKKIREPCLKCVDMVISELISTVRQCTKKLQQYP |
| | | RLREEMERIVTTHIREREGRTKEQVMLLIDIELAYMNTNHEDFIG |
| | | FANAQQRSNQMNKKKTSGNQDEILVIRKGWLTINNIGIMKGGSKE |
| | | YWFVLTAENLSWYKDDEEKEKKYMLSVDNLKLRDVEKGFMSSKHI |
| | | FALENTEQRNVYKDYRQLELACETQEEVDSWKASFLRAGVYPERV |
| | | GDKEKASETEENGSDSFMHSMDPQLERQVETIRNLVDSYMAIVNK |
| | | TVRDLMPKTIMHLMINNTKEFIFSELLANLYSCGDQNTLMEESAE |
| | | QAQRRDEMLRMYHALKEALSIIGDINTTTVSTPMPPPVDDSWLQV |
| | | QSVPAGRRSPTSSPTPQRRAPAVPPARPGSRGPAPGPPPAGSALG |
| | | GAPPVPSRPGASPDPFGPPPQVPSRPNRAPPGVPSRSGQASPSRP |
| | | ESPRPPFDLKVPVFTLEDFVGDWRQTAGYNLDQVLEQGGVSSLFQ |
| | | NLGVSVTPIQRIVLSGENGLKIDIHVIIPYEGLSGDQMGQIEKIF |
| | | KVVYPVDDHHFKVILHYGTLVIDGVTPNMIDYFGRPYEGIAVEDG |
| | | KKITVTGTLWNGNKIIDERLINPDGSLLERVTINGVTGWRLCERI |
| | | LAGGGGSPSRLEEELRRRLTEP |
| KIF1A-nanoluc- | 394 | MAGASVKVAVRVRPFNSREMSRDSKCIIQMSGSTTTIVNPKQPKE |
| alfa-tag-fusion | | TPKSFSFDYSYWSHTSPEDINYASQKQVYRDIGEEMLQHAFEGYN |
| | | VCIFAYGQTGAGKSYTMMGKQEKDQQGIIPQLCEDLESRINDTTN |
| | | DNMSYSVEVSYMEIYCERVRDLLNPKNKGNLRVREHPLLGPYVED |
| | | LSKLAVTSYNDIQDLMDSGNKARTVAATNMNETSSRSHAVENIIF |
| | | TQKRHDAETNITTEKVSKISLVDLAGSERADSTGAKGTRLKEGAN |
| | | INKSLTTLGKVISALAEMDSGPNKNKKKKKTDFIPYRDSVLTWLL |
| | | RENLGGNSRTAMVAALSPADINYDETLSTLRYADRAKQIRCNAVI |
| | | NEDPNNKLIRELKDEVTRLRDLLYAQGLGDITDMTNALVGMSPSS |
| | | SLSALSSRAASVSSLHERILFAPGSEEAIERLKETEKIIAELNET |
| | | WEEKLRRTEAIRMEREALLAEMGVAMREDGGTLGVFSPKKTPHLV |
| | | NLNEDPLMSECLLYYIKDGITRVGREDGERRQDIVLSGHFIKEEH |
| | | CVFRSDSRGGSEAVVTLEPCEGADTYVNGKKVTEPSILRSGNRII |
| | | MGKSHVERENHPEQARQERERTPCAETPAEPVDWAFAQRELLEKQ |
| | | GIDMKQEMEQRLQELEDQYRREREEATYLLEQQRLDYESKLEALQ |
| | | KOMDSRYYPEVNEEEEEPEDEVQWTERECELALWAFRKWKWYQFT |
| | | SLRDLLWGNAIFLKEANAISVELKKKVQFQFVLLTDTLYSPLPPD |
| | | LLPPEAAKDRETRPFPRTIVAVEVQDQKNGATHYWTLEKLRQRLD |
| | | LMREMYDRAAEVPSSVIEDCDNVVTGGDPFYDRFPWERLVGRAFV |
| | | YLSNLLYPVPLVHRVAIVSEKGEVKGFLRVAVQAISADEEAPDYG |
| | | SGVRQSGTAKISFDDQHFEKFQSESCPVVGMSRSGTSQEELRIVE |
| | | GQGQGADVGPSADEVNNNTCSAVPPEGLLLDSSEKAALDGPLDAA |
| | | LDHLRLGNTFTFRVTVLQASSISAEYADIFCOENFIHRHDEAFST |
| | | EPLKNTGRGPPLGFYHVQNIAVEVTKSFIEYIKSQPIVFEVFGHY |
| | | QQHPFPPLCKDVLSPLRPSRRHFPRVMPLSKPVPATKLSTLTRPC |
| | | PGPCHCKYDLLVYFEICELEANGDYIPAVVDHRGGMPCMGTFLLH |
| | | QGIQRRITVTLLHETGSHIRWKEVRELVVGRIRNTPETDESLIDP |
| | | NILSLNILSSGYIHPAQDDRTFYQFEAAWDSSMHNSLLLNRVTPY |
| | | REKIYMTLSAYIEMENCTQPAVVTKDFCMVFYSRDAKLPASRSIR |
| | | NLFGSGSLRASESNRVTGVYELSLCHVADAGSPGMQRRRRRVLDT |
| | | SVAYVRGEENLAGWRPRSDSLILDHQWELEKLSLLQEVEKTRHYL |
| | | LLREKLETAQRPVPEALSPAFSEDSESHGSSSASSPLSAEGRPSP |
| | | LEAPNERQRELAVKCLRLLTHTENREYTHSHVCVSASESKLSEMS |
| | | VTLLRDPSMSPLGVATLTPSSTCPSLVEGRYGATDLRTPQPCSRP |
| | | ASPEPELLPEADSKKLPSPARATETDKEPQRLLVPDIQEIRVSPI |
| | | VSKKGYLHFLEPHTSGWARRFVVVRRPYAYMYNSDKDTVERFVLN |
| | | LATAQVEYSEDQQAMLKTPNTFAVCTEHRGILLQAASDKDMHDWL |
| | | YAFNPLLAGTIRSKLSRRRSAQMRVKVPVFTLEDFVGDWRQTAGY |
| | | NLDQVLEQGGVSSLFQNLGVSVTPIQRIVLSGENGLKIDIHVIIP |
| | | YEGLSGDQMGQIEKIFKVVYPVDDHHFKVILHYGTLVIDGVTPNM |
| | | IDYFGRPYEGIAVEDGKKITVTGTLWNGNKIIDERLINPDGSLLF |
| | | RVTINGVTGWRLCERILAGGGGSPSRLEEELRRRLTEP |
| SYNGAP1- | 395 | MSRSRASIHRGSIPAMSYAPFRDVRGPSMHRTQYVHSPYDRPGWN |
| nanoluc-alfa- | | PRECIISGNQLLMLDEDEIHPLLIRDRRSESSRNKLLRRTVSVPV |
| tag-fusion | | EGRPHGEHEYHLGRSRRKSVPGGKQYSMEGAPAAPFRPSQGELSR |
| | | RLKSSIKRTKSQPKLDRTSSFRQILPRFRSADHDRARLMQSFKES |
| | | HSHESLLSPSSAAEALELNLDEDSIIKPVHSSILGQEFCFEVTTS |
| | | SGTKCFACRSAAERDKWIENLQRAVKPNKDNSRRVDNVLKLWIIE |
| | | ARELPPKKRYYCELCLDDMLYARTTSKPRSASGDTVFWGEHFEEN |
| | | NLPAVRALRLHLYRDSDKKRKKDKAGYVGLVTVPVATLAGRHETE |
| | | QWYPVTLPTGSGGSGGMGSGGGGGGGGSGGKGKGGCPAVRLKAR |
| | | YQTMSILPMELYKEFAEYVTNHYRMLCAVLEPALNVKGKEEVASA |
| | | LVHILQSTGKAKDFLSDMAMSEVDREMEREHLIFRENTLATKAIE |
| | | EYMRLIGQKYLKDAIGEFIRALYESEENCEVDPIKCTASSLAEHQ |
| | | ANLRMCCELALCKVVNSHCVFPRELKEVFASWRLRCAERGREDIA |
| | | DRLISASLFLRFLCPAIMSPSLFGLMQEYPDEQTSRTLTLIAKVI |
| | | QNLANFSKFTSKEDELGEMNEFLELEWGSMQQFLYEISNLDTLTN |
| | | SSSFEGYIDLGRELSTLHALLWEVLPQLSKEALLKLGPLPRLLND |
| | | ISTALRNPNIQRQPSRQSERPRPQPVVLRGPSAEMQGYMMRDLNS |
| | | SIDLQSFMARGINSSMDMARLPSPTKEKPPPPPPGGGKDLFYVSR |
| | | PPLARSSPAYCTSSSDITEPEQKMLSVNKSVSMLDLQGDGPGGRL |
| | | NSSSVSNLAAVGDLLHSSQASLTAALGLRPAPAGRLSQGSGSSIT |
| | | AAGMRLSQMGVTTDGVPAQQLRIPLSFONPLFHMAADGPGPPGGH |
| | | GGGGGHGPPSSHHHHHHHHHHRGGEPPGDTFAPFHGYSKSEDLSS |
| | | GVPKPPAASILHSHSYSDEFGPSGTDFTRRQLSLQDNLQHMLSPP |
| | | QITIGPQRPAPSGPGGGSGGGSGGGGGGQPPPLQRGKSQQLTVSA |
| | | AQKPRPSSGNLLQSPEPSYGPARPRQQSLSKEGSIGGSGGSGGGG |
| | | GGGLKPSITKQHSQTPSTLNPTMPASERTVAWVSNMPHLSADIES |
| | | AHIEREEYKLKEYSKSMDESRLDRVKEYEEEIHSLKERLHMSNRK |
| | | LEEYERRLLSQEEQTSKILMQYQARLEQSEKRLRQQQAEKDSQIK |
| | | SIIGRLMLVEEELRRDHPAMAEPLPEPKKRLLDAQERQLPPLGPT |
| | | NPRVTLAPPWNGLAPPAPPPPPRLQITENGEFRNTADHKVPVETL |
| | | EDFVGDWRQTAGYNLDQVLEQGGVSSLFQNLGVSVTPIQRIVLSG |
| | | ENGLKIDIHVIIPYEGLSGDQMGQIEKIFKVVYPVDDHHFKVILH |
| | | YGTLVIDGVTPNMIDYFGRPYEGIAVEDGKKITVTGTLWNGNKII |
| | | DERLINPDGSLLFRVTINGVTGWRLCERILAGGGGSPSRLEEELR |
| | | RRLTEP |
| PYDC2-nanoluc- | 396 | MASSAELDENLQALLEQLSQDELSKFKSLIRTISLGKELQTVPQT |
| alfa-tag-fusion | | EVDKANGKQLVEIFTSHSCSYWAGMAAIQVFEKMNOTHLSGRADE |
| | | HCVMPPPKVPVFTLEDFVGDWRQTAGYNLDQVLEQGGVSSLFQNL |
| | | GVSVTPIQRIVLSGENGLKIDIHVIIPYEGLSGDQMGQIEKIFKV |
| | | VYPVDDHHFKVILHYGTLVIDGVTPNMIDYFGRPYEGIAVEDGKK |
| | | ITVTGTLWNGNKIIDERLINPDGSLLFRVTINGVTGWRLCERILA |
| | | GGGGSPSRLEEELRRRLTEP |
| CSTB-nanoluc- | 397 | MMCGAPSATQPATAETQHIADQVRSQLEEKENKKEPVFKAVSEKS |
| alfa-tag-fusion | | QVVAGTNYFIKVHVGDEDFVHLRVFQSLPHENKPLTLSNYQTNKA |
| | | KHDELTYFKVPVFTLEDFVGDWRQTAGYNLDOVLEQGGVSSLFON |
| | | LGVSVTPIQRIVLSGENGLKIDIHVIIPYEGLSGDQMGQIEKIFK |
| | | VVYPVDDHHFKVILHYGTLVIDGVTPNMIDYFGRPYEGIAVEDGK |
| | | KITVTGTLWNGNKIIDERLINPDGSLLFRVTINGVTGWRLCERIL |
| | | AGGGGSPSRLEEELRRRLTEP |
| PCBD1-nanoluc- | 398 | MAGKAHRLSAEERDQLLPNLRAVGWNELEGRDAIFKQFHFKDENR |
| alfa-tag-fusion | | AFGFMTRVALQAEKLDHHPEWENVYNKVHITLSTHECAGLSERDI |
| | | NLASFIEQVAVSMTKVPVFTLEDFVGDWRQTAGYNLDQVLEQGGV |
| | | SSLFQNLGVSVTPIQRIVLSGENGLKIDIHVIIPYEGLSGDQMGQ |
| | | IEKIFKVVYPVDDHHFKVILHYGTLVIDGVTPNMIDYFGRPYEGI |

AVFDGKKITVTGTLWNGNKIIDERLINPDGSLLERVTINGVTGWR
LCERILAGGGGSPSRLEEELRRRLTEP

[0332] The amino acid sequence of exemplary fusion proteins comprising a control or a targeted engineered deubiquitinase are detailed in Table 11 below.

TABLE 11
Amino Acid Sequence of exemplary enDub Control and
Screening Fusion Proteins

| | SEQ | |
|---|---|---|
| | ID | |
| Description | NO | Amino Acid Sequence |
| FireflyLuciferase- | 399 | MEDAKNIKKGPAPFYPLEDGTAGEQLHKAMKRYALVPGTIAFTDA |
| P2A-nano | | HIEVDITYAEYFEMSVRLAEAMKRYGLNTNHRIVVCSENSLQFFM |
| (Control) | | PVLGALFIGVAVAPANDIYNERELLNSMGISQPTVVFVSKKGLQK |
| | | ILNVQKKLPIIQKIIIMDSKTDYQGFQSMYTFVTSHLPPGENEYD |
| | | FVPESFDRDKTIALIMNSSGSTGLPKGVALPHRTACVRESHARDP |
| | | IFGNQIIPDTAILSVVPFHHGFGMFTTLGYLICGERVVLMYRFEE |
| | | ELFLRSLQDYKIQSALLVPTLESFFAKSTLIDKYDLSNLHEIASG |
| | | GAPLSKEVGEAVAKRFHLPGIRQGYGLTETTSAILITPEGDDKPG |
| | | AVGKVVPFFEAKVVDLDTGKTLGVNQRGELCVRGPMIMSGYVNNP |
| | | EATNALIDKDGWLHSGDIAYWDEDEHFFIVDRLKSLIKYKGYQVA |
| | | PAELESILLQHPNIFDAGVAGLPDDDAGELPAAVVVLEHGKTMTE |
| | | KEIVDYVASQVTTAKKLRGGVVFVDEVPKGLTGKLDARKIREILI |
| | | KAKKGGKIAVTRLKGSGATNFSLLKQAGDVEENPGPRSGTGSSGE |
| | | VQLQESGGGLVQPGGSLRLSCTASGVTISALNAMAMGWYRQAPGE |
| | | RRVMVAAVSERGNAMYRESVQGRFTVTRDETNKMVSLQMDNLKPE |
| | | DTAVYYCHVLEDRVDSFHDYWGQGTQVTVSS |
| FireflyLuciferase- | 400 | MEDAKNIKKGPAPFYPLEDGTAGEQLHKAMKRYALVPGTIAFTDA |
| P2A-Cezanne | | HIEVDITYAEYFEMSVRLAEAMKRYGLNTNHRIVVCSENSLQFEM |
| (Control) | | PVLGALFIGVAVAPANDIYNERELLNSMGISQPTVVFVSKKGLQK |
| | | ILNVQKKLPIIQKIIIMDSKTDYQGFQSMYTFVTSHLPPGENEYD |
| | | FVPESFDRDKTIALIMNSSGSTGLPKGVALPHRTACVRESHARDP |
| | | IFGNQIIPDTAILSVVPFHHGFGMFTTLGYLICGERVVLMYRFEE |
| | | ELFLRSLQDYKIQSALLVPTLESFFAKSTLIDKYDLSNLHEIASG |
| | | GAPLSKEVGEAVAKRFHLPGIRQGYGLTETTSAILITPEGDDKPG |
| | | AVGKVVPFFEAKVVDLDTGKTLGVNQRGELCVRGPMIMSGYVNNP |
| | | EATNALIDKDGWLHSGDIAYWDEDEHFFIVDRLKSLIKYKGYQVA |
| | | PAELESILLQHPNIFDAGVAGLPDDDAGELPAAVVVLEHGKTMTE |
| | | KEIVDYVASQVTTAKKLRGGVVFVDEVPKGLTGKLDARKIREILI |
| | | KAKKGGKIAVTRLKGSGATNFSLLKQAGDVEENPGPRSGTGSPPS |
| | | FSEGSGGSRTPEKGFSDREPTRPPRPILQRQDDIVQEKRLSRGIS |
| | | HASSSIVSLARSHVSSNGGGGGSNEHPLEMPICAFQLPDLTVYNE |
| | | DERSFIERDLIEQSMLVALEQAGRLNWWVSVDPTSQRLLPLATTG |
| | | DGNCLLHAASLGMWGFHDRDLMLRKALYALMEKGVEKEALKRRWR |
| | | WQQTQQNKESGLVYTEDEWQKEWNELIKLASSEPRMHLGTNGANC |
| | | GGVESSEEPVYESLEEFHVFVLAHVLRRPIVVVADTMLRDSGGEA |
| | | FAPIPFGGIYLPLEVPASQCHRSPLVLAYDQAHFSALVSMEQKEN |
| | | TKEQAVIPLTDSEYKLLPLHFAVDPGKGWEWGKDDSDNVRLASVI |
| | | LSLEVKLHLLHSYMNVKWIPLSSDAQAPLAQ |
| FireflyLuciferase- | 401 | MEDAKNIKKGPAPFYPLEDGTAGEQLHKAMKRYALVPGTIAFTDA |
| P2A- | | HIEVDITYAEYFEMSVRLAEAMKRYGLNTNHRIVVCSENSLQFFM |
| a_alfatag_nano- | | PVLGALFIGVAVAPANDIYNERELLNSMGISQPTVVFVSKKGLQK |
| Cezanne | | ILNVQKKLPIIQKIIIMDSKTDYQGFQSMYTFVTSHLPPGENEYD |
| | | FVPESEDRDKTIALIMNSSGSTGLPKGVALPHRTACVRESHARDP |
| | | IFGNQIIPDTAILSVVPFHHGFGMFTTLGYLICGFRVVLMYRFEE |
| | | ELFLRSLQDYKIQSALLVPTLESFFAKSTLIDKYDLSNLHEIASG |
| | | GAPLSKEVGEAVAKRFHLPGIRQGYGLTETTSAILITPEGDDKPG |
| | | AVGKVVPFFEAKVVDLDTGKTLGVNQRGELCVRGPMIMSGYVNNP |
| | | EATNALIDKDGWLHSGDIAYWDEDEHFFIVDRLKSLIKYKGYQVA |
| | | PAELESILLQHPNIFDAGVAGLPDDDAGELPAAVVVLEHGKTMTE |
| | | KEIVDYVASQVTTAKKLRGGVVFVDEVPKGLTGKLDARKIREILI |
| | | KAKKGGKIAVTRLKGSGATNFSLLKQAGDVEENPGPRSGTGSSGE |
| | | VQLQESGGGLVQPGGSLRLSCTASGVTISALNAMAMGWYRQAPGE |
| | | RRVMVAAVSERGNAMYRESVQGRFTVTRDFTNKMVSLQMDNLKPE |
| | | DTAVYYCHVLEDRVDSFHDYWGQGTQVTVSSGAPGSGPPSFSEGS |
| | | GGSRTPEKGESDREPTRPPRPILQRQDDIVQEKRLSRGISHASSS |
| | | IVSLARSHVSSNGGGGGSNEHPLEMPICAFQLPDLTVYNEDERSE |
| | | IERDLIEQSMLVALEQAGRLNWWVSVDPTSQRLLPLATTGDGNCL |
| | | LHAASLGMWGFHDRDLMLRKALYALMEKGVEKEALKRRWRWQQTQ |
| | | QNKESGLVYTEDEWQKEWNELIKLASSEPRMHLGTNGANCGGVES |
| | | SEEPVYESLEEFHVFVLAHVLRRPIVVVADTMLRDSGGEAFAPIP |
| | | FGGIYLPLEVPASQCHRSPLVLAYDQAHFSALVSMEQKENTKEQA |
| | | VIPLTDSEYKLLPLHFAVDPGKGWEWGKDDSDNVRLASVILSLEV |
| | | KLHLLHSYMNVKWIPLSSDAQAPLAQ |

[0333] The assay was conducted with utilizing the tagged proteins and targeted enDubs described above in Tables 7 and 8. The results of the SHANK3 targeting are shown in FIG. 3, showing a 2.4-fold increase in SHANK3 protein expression relative to the control. The results from the SYNGAP1 targeting are shown in FIG. 4, showing a 3.1-fold increase in SYNGAP1 protein expression relative to the control. The results of the PYDC2 targeting are shown in FIG. 5, showing a 2.64-fold increase in PYDC2 protein expression. The results of the CSTB targeting are shown in FIG. 6, showing a 1.61-fold increase in CSTB protein expression. The results of the PCBD1 targeting are shown in FIG. 7, showing a 1.13-fold increase in PCBD1 protein expression. The control used for the PYDC2, CSTB, and PCBD1 experiments is the engineered deubiquitinase without the nanobody targeting the alfa-tag. Normalization of transduction efficiency was performed using the firefly luciferase signal as the reference and the ratio between NLuc signal divided by firefly luciferase signal plotted on the y axes.

### 6.4 Example 4. Generation of Anti-SYNGAP-1 VHH

[0334] Anti-SYNGAP-1 VHHs (i.e. nanobodies) were generated according to the materials and methods below.

### 6.4.1 Antigen Expression

[0335] cDNA of His-SynGAP-EC[1186-1277] (Uniprot #Q96PV0) with 6His tag at 5′/N-terminal was chemically synthesized with codon optimization for bacterial systems, then sub-cloned in an expression vector. Full protein sequence is as follows: MGSHHHHHHSGKSMDESRLDRVKEYEEEIHSLKERLHMSNRKLEEYERRLLSQEEQTSKILMQY QARLEQSEKRLRQQQAEKDSQIKSIIGRLMLVEEELRRDHPAMAEPLPEPKKRLLDAQERQLPP LGPT (SEQ ID NO: 368). His-SynGAP-EC[1186-1277] was expressed in E. coli, then purified by affinity against 6His-tag using Nickel resin. Purification test results of His-SynGAP-EC [1186-1277] in E. coli are shown in FIG. 8. 4.08MG of His-SynGAP-EC [1186-1277] was produced with a molecular weight of 15.75 kDA and a pI of 7.38.

### 6.4.2 Phage Display

[0336] A series of camelid VHHs were screened for binding to the His-SynGAP-EC[1186-1277] produced above. Briefly, a tube was coated with His-SynGAP-EC[1186-1277], washed, blocked, washed, incubated with a phase library expressing camelid VHHs, washed, and the phages expressing camelid VHH binders that bound to His-SynGAP-EC[1186-1277] were eluted from the tube with glycine-HCL. The concentration of the eluted phages was determined. First, the eluted phages were added to E. Coli TG1. TG1 was poured onto a plate and cultured upside down. The PFU was calculated based on the number of plaques (i.e. dead TG1) on the plate. The eluted phages were added to TG1 followed infection by helper phage and cultured. Phages were precipitated with PEG/NaCl and subsequently resuspended. The phages were screened using a polyclonal ELISA and a monoclonal ELISA. Briefly, the polyclonal ELISA was carried out utilizing a plate coated with His-SynGAP-EC[1186-1277] (4 g/mL) or control buffer. The coated plate was washed, blocked, washed, and incubated with the amplified eluted phages. Subsequently the plate was washed and incubated with anti-phage-HRP antibody, washed, and incubated with TMB followed by HCL. The result readings were taken at 450 nm. The monoclonal phase ELISA was carried out according to the following. Single TG1 clones randomly selected from plates (described above) were cultured with helper phage. A total of 192 clones from round 3+96 clones from round 4+96 clones from round 5 were selected. The clones were centrifuged and the supernatant (i.e. the phages) were collected. A plate was coated with His-SynGAP-EC[1186-1277](4 μg/ml) or control buffer. The plate was washed, blocked, washed, incubated with the selected phages, washed, incubated with anti-phage-HRP antibody, washed, and incubated with TMB followed by HCL. The results were read of 450 nm.

[0337] Six anti-His-SynGAP-EC[1186-1277] VHHs were identified and sequenced from the above. The amino acid sequence of the six anti-His-SynGAP-EC[1186-1277] VHHs is disclosed in Table 12 below.

TABLE 12
Amino Acid Sequence of Anti-SynGAP VHHs

| Description | | SEQ ID NO | Amino Acid Sequence |
|---|---|---|---|
| FLX00152 | CDR1 | 290 | GFSFSNEP |
| | CDR2 | 291 | INQDGRNT |
| | CDR3 | 292 | QAIRTTTHEDS |
| | VH | 293 | QVQLVESGGGLVQPGGSLRLSCAASGESESNFPMMWVR |
| | | | QAPGKGREWVADINQDGRNTYYADSVKGRFTISRDNAK |
| | | | TTVYLQMNNLNPEDTAVYYCQAIRTTTHEDSWGQGTQV |
| | | | TVSS |
| FLX00153 | CDR1 | 294 | GFTFSNYR |
| | CDR2 | 295 | IDRSGTYT |
| | CDR3 | 296 | AADRRLIVDLTPEVYDH |
| | VH | 297 | QLQLVESGGGLVQPGESLRLSCAASGFTESNYRMYWVR |
| | | | MAPGKGLEWVSDIDRSGTYTYYADSVKGRFAISRDNAK |
| | | | NTVYLQMNSLKPEDTAVYYCAADRRLIVDLTPEVYDHW |
| | | | GQGTQVTVSS |
| FLX00154 | CDR1 | 298 | GFIFSSYQ |
| | CDR2 | 299 | INTGGWNT |
| | CDR3 | 300 | AADRWMVAKIVGGDLDEDS |
| | VH | 301 | QVQLVESGGGLVQPGGSLRLSCAASGFIFSSYQMAWVR |
| | | | QAPGKGLEWVADINTGGWNTYYADSVKGRFTISRDNAK |
| | | | NTLYLEMNSLKPEDTAVYYCAADRWMVAKIVGGDLDED |
| | | | SWGQGTQVTVSS |
| FLX00155 | CDR1 | 302 | GFAFGSYD |
| | CDR2 | 303 | ITPGGGGT |
| | CDR3 | 304 | YYCAKNFYGNGG |
| | VH | 305 | QVQLVESGGGLVQPGGSLRLSCAASGFAFGSYDMSWVR |
| | | | QAPGQGPEWVSAITPGGGGTFYAYYSDSVKGRFAISRD |
| | | | NAKNTLTLQMNSLKPDDTAMYYCAKNFYGNGGRGHGTQ |
| | | | VTVSS |
| FLX00156 | CDR1 | 306 | GFTFGTHA |
| | CDR2 | 307 | ISSGGGGT |
| | CDR3 | 308 | NSPSNIANDN |
| | VH | 309 | QVQLVESGGGLVQPGGSLRLACAASGFTFGTHAMHWVR |
| | | | WAPGKGFEWVSTISSGGGGTRYADSVKGRFTISRDNAK |
| | | | NTVYLQMDNLKPEDTAVYYCNSPSNIANDNWGQGTQVT |
| | | | VSS |
| FLX00157 | CDR1 | 310 | ERTFGHYA |
| | CDR2 | 311 | ISWKGGTT |
| | CDR3 | 312 | AARNTMSGSMSSSAYPY |
| | VH | 313 | QVQLVESGGGLVQAGASLRLSCAASERTFGHYAMGWER |
| | | | QAPGKEREFVATISWKGGTTGYAHSVKGRFTISRDSAK |
| | | | NMVYLQMNSLKPEDTAVYYCAARNTMSGSMSSSAYPYW |
| | | | GQGTQVTVSS |

### 6.5 Example 5. Deubiquitinase Activity of Anti-SYNGAP1 Targeted enDubs

[0338] EnDubs targeting SYNGAP1 were constructed using the anti-SYNGAP1 nanobodies described in above in Example 4. The experimental fusion proteins contained from N to C terminus: FireflyLuciferase-P2A-anti-syngap1 nanobody-Cezanne catalytic domain. The amino acid sequence of each of the experimental anti-SYNGAP1 enDubs is provided below in Table 13.

[0339] Table 13 provides the amino acid sequence of exemplary anti-SYNGAP1 enDubs.

TABLE 13
Amino Acid Sequence of Anti-SYNGAP1 enDubs

| | SEQ | |
|---|---|---|
| | ID | |
| Description | NO | Amino Acid Sequence |
| FireflyLuciferase- | 369 | MEDAKNIKKGPAPFYPLEDGTAGEQLHKAMKRYALVPGTIAFTD |
| P2A-anti- | | AHIEVDITYAEYFEMSVRLAEAMKRYGLNTNHRIVVCSENSLOF |
| syngap1_FLX0015 | | FMPVLGALFIGVAVAPANDIYNERELLNSMGISQPTVVFVSKKG |
| 7-Cezanne | | LQKILNVQKKLPIIQKIIIMDSKTDYQGFQSMYTFVTSHLPPGE |
| | | NEYDFVPESEDRDKTIALIMNSSGSTGLPKGVALPHRTACVRES |
| | | HARDPIFGNQIIPDTAILSVVPFHHGFGMFTTLGYLICGFRVVL |
| | | MYRFEEELFLRSLQDYKIQSALLVPTLFSFFAKSTLIDKYDLSN |
| | | LHEIASGGAPLSKEVGEAVAKRFHLPGIRQGYGLTETTSAILIT |
| | | PEGDDKPGAVGKVVPFFEAKVVDLDTGKTLGVNQRGELCVRGPM |
| | | IMSGYVNNPEATNALIDKDGWLHSGDIAYWDEDEHFFIVDRLKS |
| | | LIKYKGYQVAPAELESILLQHPNIFDAGVAGLPDDDAGELPAAV |
| | | VVLEHGKTMTEKEIVDYVASQVTTAKKLRGGVVFVDEVPKGLTG |
| | | KLDARKIREILIKAKKGGKIAVTRLKGSGATNFSLLKQAGDVEE |
| | | NPGPRSGTGSSGQVQLVESGGGLVQAGASLRLSCAASERTFGHY |
| | | AMGWFRQAPGKEREFVATISWKGGTTGYAHSVKGRFTISRDSAK |
| | | NMVYLQMNSLKPEDTAVYYCAARNTMSGSMSSSAYPYWGQGTQV |
| | | TVSSGGGGSGGGGSGGGGSGGGGSQVQLVESGGGLVQAGASLRL |
| | | SCAASERTFGHYAMGWFRQAPGKEREFVATISWKGGTTGYAHSV |
| | | KGRFTISRDSAKNMVYLQMNSLKPEDTAVYYCAARNTMSGSMSS |
| | | SAYPYWGQGTQVTVSSGAPGSGPPSFSEGSGGSRTPEKGESDRE |
| | | PTRPPRPILQRQDDIVQEKRLSRGISHASSSIVSLARSHVSSNG |
| | | GGGGSNEHPLEMPICAFQLPDLTVYNEDERSFIERDLIEQSMLV |
| | | ALEQAGRLNWWVSVDPTSQRLLPLATTGDGNCLLHAASLGMWGF |
| | | HDRDLMLRKALYALMEKGVEKEALKRRWRWQQTQQNKESGLVYT |
| | | EDEWQKEWNELIKLASSEPRMHLGTNGANCGGVESSEEPVYESL |
| | | EEFHVFVLAHVLRRPIVVVADTMLRDSGGEAFAPIPEGGIYLPL |
| | | EVPASQCHRSPLVLAYDQAHFSALVSMEQKENTKEQAVIPLTDS |
| | | EYKLLPLHFAVDPGKGWEWGKDDSDNVRLASVILSLEVKLHLLH |
| | | SYMNVKWIPLSSDAQAPLAQ |
| FireflyLuciferase- | 370 | MEDAKNIKKGPAPFYPLEDGTAGEQLHKAMKRYALVPGTIAFTD |
| P2A-anti- | | AHIEVDITYAEYFEMSVRLAEAMKRYGLNTNHRIVVCSENSLQF |
| syngap1_FLX0015 | | FMPVLGALFIGVAVAPANDIYNERELLNSMGISQPTVVFVSKKG |
| 6-Cezanne | | LQKILNVQKKLPIIQKIIIMDSKTDYQGFQSMYTFVTSHLPPGE |
| | | NEYDFVPESFDRDKTIALIMNSSGSTGLPKGVALPHRTACVRES |
| | | HARDPIFGNQIIPDTAILSVVPFHHGFGMFTTLGYLICGERVVL |
| | | MYRFEEELFLRSLQDYKIQSALLVPTLESFFAKSTLIDKYDLSN |
| | | LHEIASGGAPLSKEVGEAVAKRFHLPGIRQGYGLTETTSAILIT |
| | | PEGDDKPGAVGKVVPFFEAKVVDLDTGKTLGVNQRGELCVRGPM |
| | | IMSGYVNNPEATNALIDKDGWLHSGDIAYWDEDEHFFIVDRLKS |
| | | LIKYKGYQVAPAELESILLQHPNIFDAGVAGLPDDDAGELPAAV |
| | | VVLEHGKTMTEKEIVDYVASQVTTAKKLRGGVVFVDEVPKGLTG |
| | | KLDARKIREILIKAKKGGKIAVTRLKGSGATNFSLLKQAGDVEE |
| | | NPGPRSGTGSSGQVQLVESGGGLVQPGGSLRLACAASGFTFGTH |
| | | AMHWVRWAPGKGFEWVSTISSGGGGTRYADSVKGRFTISRDNAK |
| | | NTVYLQMDNLKPEDTAVYYCNSPSNIANDNWGQGTQVTVSSGGG |
| | | GSGGGGSGGGGSGGGGSQVQLVESGGGLVQPGGSLRLACAASGF |
| | | TFGTHAMHWVRWAPGKGFEWVSTISSGGGGTRYADSVKGRFTIS |
| | | RDNAKNTVYLQMDNLKPEDTAVYYCNSPSNIANDNWGQGTQVTV |
| | | SSGAPGSGPPSFSEGSGGSRTPEKGFSDREPTRPPRPILQRQDD |
| | | IVQEKRLSRGISHASSSIVSLARSHVSSNGGGGGSNEHPLEMPI |
| | | CAFQLPDLTVYNEDERSFIERDLIEQSMLVALEQAGRLNWWVSV |
| | | DPTSQRLLPLATTGDGNCLLHAASLGMWGFHDRDLMLRKALYAL |
| | | MEKGVEKEALKRRWRWQQTQQNKESGLVYTEDEWQKEWNELIKL |
| | | ASSEPRMHLGTNGANCGGVESSEEPVYESLEEFHVEVLAHVLRR |
| | | PIVVVADTMLRDSGGEAFAPIPEGGIYLPLEVPASQCHRSPLVL |
| | | AYDQAHFSALVSMEQKENTKEQAVIPLTDSEYKLLPLHFAVDPG |
| | | KGWEWGKDDSDNVRLASVILSLEVKLHLLHSYMNVKWIPLSSDA |
| | | QAPLAQ |
| FireflyLuciferase- | 371 | MEDAKNIKKGPAPFYPLEDGTAGEQLHKAMKRYALVPGTIAFTD |
| P2A-anti- | | AHIEVDITYAEYFEMSVRLAEAMKRYGLNTNHRIVVCSENSLQF |
| syngap1_FLX0015 | | FMPVLGALFIGVAVAPANDIYNERELLNSMGISQPTVVFVSKKG |
| 5-Cezanne | | LQKILNVQKKLPIIQKIIIMDSKTDYQGFQSMYTFVTSHLPPGE |
| | | NEYDFVPESEDRDKTIALIMNSSGSTGLPKGVALPHRTACVRES |
| | | HARDPIFGNQIIPDTAILSVVPFHHGFGMFTTLGYLICGFRVVL |
| | | MYRFEEELFLRSLQDYKIQSALLVPTLESFFAKSTLIDKYDLSN |
| | | LHEIASGGAPLSKEVGEAVAKRFHLPGIRQGYGLTETTSAILIT |
| | | PEGDDKPGAVGKVVPFFEAKVVDLDTGKTLGVNQRGELCVRGPM |
| | | IMSGYVNNPEATNALIDKDGWLHSGDIAYWDEDEHFFIVDRLKS |
| | | LIKYKGYQVAPAELESILLQHPNIFDAGVAGLPDDDAGELPAAV |
| | | VVLEHGKTMTEKEIVDYVASQVTTAKKLRGGVVFVDEVPKGLTG |
| | | KLDARKIREILIKAKKGGKIAVTRLKGSGATNFSLLKQAGDVEE |
| | | NPGPRSGTGSSGQVOLVESGGGLVQPGGSLRLSCAASGFAFGSY |
| | | DMSWVRQAPGQGPEWVSAITPGGGGTFYAYYSDSVKGRFAISRD |
| | | NAKNTLTLQMNSLKPDDTAMYYCAKNFYGNGGRGHGTQVTVSSG |
| | | GGGSGGGGSGGGGSGGGGSQVQLVESGGGLVQPGGSLRLSCAAS |
| | | GFAFGSYDMSWVRQAPGQGPEWVSAITPGGGGTFYAYYSDSVKG |
| | | REAISRDNAKNTLTLQMNSLKPDDTAMYYCAKNFYGNGGRGHGT |
| | | QVTVSSGAPGSGPPSFSEGSGGSRTPEKGFSDREPTRPPRPILQ |
| | | RQDDIVQEKRLSRGISHASSSIVSLARSHVSSNGGGGGSNEHPL |
| | | EMPICAFQLPDLTVYNEDERSFIERDLIEQSMLVALEQAGRLNW |
| | | WVSVDPTSQRLLPLATTGDGNCLLHAASLGMWGFHDRDLMLRKA |
| | | LYALMEKGVEKEALKRRWRWQQTQQNKESGLVYTEDEWQKEWNE |
| | | LIKLASSEPRMHLGTNGANCGGVESSEEPVYESLEEFHVEVLAH |
| | | VLRRPIVVVADTMLRDSGGEAFAPIPEGGIYLPLEVPASQCHRS |
| | | PLVLAYDQAHFSALVSMEQKENTKEQAVIPLTDSEYKLLPLHFA |
| | | VDPGKGWEWGKDDSDNVRLASVILSLEVKLHLLHSYMNVKWIPL |
| | | SSDAQAPLAQ |
| FireflyLuciferase- | 372 | MEDAKNIKKGPAPFYPLEDGTAGEQLHKAMKRYALVPGTIAFTD |
| P2A-anti- | | AHIEVDITYAEYFEMSVRLAEAMKRYGLNTNHRIVVCSENSLOF |
| syngap1_FLX0015 | | FMPVLGALFIGVAVAPANDIYNERELLNSMGISQPTVVFVSKKG |
| 4-Cezanne | | LQKILNVQKKLPIIQKIIIMDSKTDYQGFQSMYTFVTSHLPPGF |
| | | NEYDFVPESFDRDKTIALIMNSSGSTGLPKGVALPHRTACVRES |
| | | HARDPIFGNQIIPDTAILSVVPFHHGFGMFTTLGYLICGFRVVL |
| | | MYRFEEELFLRSLQDYKIQSALLVPTLESFFAKSTLIDKYDLSN |
| | | LHEIASGGAPLSKEVGEAVAKRFHLPGIRQGYGLTETTSAILIT |
| | | PEGDDKPGAVGKVVPFFEAKVVDLDTGKTLGVNQRGELCVRGPM |
| | | IMSGYVNNPEATNALIDKDGWLHSGDIAYWDEDEHFFIVDRLKS |
| | | LIKYKGYQVAPAELESILLQHPNIFDAGVAGLPDDDAGELPAAV |
| | | VVLEHGKTMTEKEIVDYVASQVTTAKKLRGGVVFVDEVPKGLTG |
| | | KLDARKIREILIKAKKGGKIAVTRLKGSGATNFSLLKQAGDVEE |
| | | NPGPRSGTGSSGQVOLVESGGGLVQPGGSLRLSCAASGFIFSSY |
| | | QMAWVRQAPGKGLEWVADINTGGWNTYYADSVKGRFTISRDNAK |
| | | NTLYLEMNSLKPEDTAVYYCAADRWMVAKIVGGDLDEDSWGQGT |
| | | QVTVSSGGGGSGGGGSGGGGSGGGGSQVQLVESGGGLVQPGGSL |
| | | RLSCAASGFIFSSYQMAWVRQAPGKGLEWVADINTGGWNTYYAD |
| | | SVKGRFTISRDNAKNTLYLEMNSLKPEDTAVYYCAADRWMVAKI |
| | | VGGDLDFDSWGQGTQVTVSSGAPGSGPPSFSEGSGGSRTPEKGF |
| | | SDREPTRPPRPILQRQDDIVQEKRLSRGISHASSSIVSLARSHV |
| | | SSNGGGGGSNEHPLEMPICAFQLPDLTVYNEDERSFIERDLIEQ |
| | | SMLVALEQAGRLNWWVSVDPTSQRLLPLATTGDGNCLLHAASLG |
| | | MWGFHDRDLMLRKALYALMEKGVEKEALKRRWRWQQTQQNKESG |
| | | LVYTEDEWQKEWNELIKLASSEPRMHLGTNGANCGGVESSEEPV |
| | | YESLEEFHVFVLAHVLRRPIVVVADTMLRDSGGEAFAPIPEGGI |
| | | YLPLEVPASQCHRSPLVLAYDQAHFSALVSMEQKENTKEQAVIP |
| | | LTDSEYKLLPLHFAVDPGKGWEWGKDDSDNVRLASVILSLEVKL |
| | | HLLHSYMNVKWIPLSSDAQAPLAQ |
| FireflyLuciferase- | 373 | MEDAKNIKKGPAPFYPLEDGTAGEQLHKAMKRYALVPGTIAFTD |
| P2A-anti- | | AHIEVDITYAEYFEMSVRLAEAMKRYGLNTNHRIVVCSENSLOF |
| syngap1_FLX0015 | | FMPVLGALFIGVAVAPANDIYNERELLNSMGISQPTVVFVSKKG |
| 3-Cezanne | | LQKILNVQKKLPIIQKIIIMDSKTDYQGFQSMYTFVTSHLPPGE |
| | | NEYDFVPESFDRDKTIALIMNSSGSTGLPKGVALPHRTACVRES |
| | | HARDPIFGNQIIPDTAILSVVPFHHGFGMFTTLGYLICGERVVL |
| | | MYRFEEELFLRSLQDYKIQSALLVPTLESFFAKSTLIDKYDLSN |
| | | LHEIASGGAPLSKEVGEAVAKRFHLPGIRQGYGLTETTSAILIT |
| | | PEGDDKPGAVGKVVPFFEAKVVDLDTGKTLGVNQRGELCVRGPM |
| | | IMSGYVNNPEATNALIDKDGWLHSGDIAYWDEDEHFFIVDRLKS |
| | | LIKYKGYQVAPAELESILLQHPNIFDAGVAGLPDDDAGELPAAV |
| | | VVLEHGKTMTEKEIVDYVASQVTTAKKLRGGVVFVDEVPKGLTG |
| | | KLDARKIREILIKAKKGGKIAVTRLKGSGATNFSLLKQAGDVEE |
| | | NPGPRSGTGSSGQLQLVESGGGLVQPGESLRLSCAASGFTFSNY |
| | | RMYWVRMAPGKGLEWVSDIDRSGTYTYYADSVKGRFAISRDNAK |
| | | NTVYLQMNSLKPEDTAVYYCAADRRLIVDLTPEVYDHWGQGTQV |
| | | TVSSGAPGSGPPSFSEGSGGSRTPEKGFSDREPTRPPRPILQRQ |
| | | DDIVQEKRLSRGISHASSSIVSLARSHVSSNGGGGGSNEHPLEM |
| | | PICAFQLPDLTVYNEDERSFIERDLIEQSMLVALEQAGRLNWWV |
| | | SVDPTSQRLLPLATTGDGNCLLHAASLGMWGFHDRDLMLRKALY |
| | | ALMEKGVEKEALKRRWRWQQTQQNKESGLVYTEDEWQKEWNELI |
| | | KLASSEPRMHLGTNGANCGGVESSEEPVYESLEEFHVEVLAHVL |
| | | RRPIVVVADTMLRDSGGEAFAPIPEGGIYLPLEVPASQCHRSPL |
| | | VLAYDQAHESALVSMEQKENTKEQAVIPLTDSEYKLLPLHFAVD |
| | | PGKGWEWGKDDSDNVRLASVILSLEVKLHLLHSYMNVKWIPLSS |
| | | DAQAPLAQ |
| FireflyLuciferase- | 374 | MEDAKNIKKGPAPFYPLEDGTAGEQLHKAMKRYALVPGTIAFTD |
| P2A-anti- | | AHIEVDITYAEYFEMSVRLAEAMKRYGLNTNHRIVVCSENSLQF |
| syngap1_FLX0015 | | FMPVLGALFIGVAVAPANDIYNERELLNSMGISQPTVVFVSKKG |
| 2-Cezanne | | LQKILNVQKKLPIIQKIIIMDSKTDYQGFQSMYTFVTSHLPPGE |
| | | NEYDFVPESEDRDKTIALIMNSSGSTGLPKGVALPHRTACVRES |
| | | HARDPIFGNQIIPDTAILSVVPFHHGFGMFTTLGYLICGERVVL |
| | | MYRFEEELFLRSLQDYKIQSALLVPTLESFFAKSTLIDKYDLSN |
| | | LHEIASGGAPLSKEVGEAVAKRFHLPGIRQGYGLTETTSAILIT |
| | | PEGDDKPGAVGKVVPFFEAKVVDLDTGKTLGVNQRGELCVRGPM |
| | | IMSGYVNNPEATNALIDKDGWLHSGDIAYWDEDEHFFIVDRLKS |
| | | LIKYKGYQVAPAELESILLQHPNIFDAGVAGLPDDDAGELPAAV |
| | | VVLEHGKTMTEKEIVDYVASQVTTAKKLRGGVVFVDEVPKGLTG |
| | | KLDARKIREILIKAKKGGKIAVTRLKGSGATNFSLLKQAGDVEE |
| | | NPGPRSGTGSSGQVQLVESGGGLVQPGGSLRLSCAASGESESNE |
| | | PMMWVRQAPGKGREWVADINQDGRNTYYADSVKGRFTISRDNAK |
| | | TTVYLQMNNLNPEDTAVYYCQAIRTTTHEDSWGQGTQVTVSSGA |
| | | PGSGPPSFSEGSGGSRTPEKGFSDREPTRPPRPILQRQDDIVQE |
| | | KRLSRGISHASSSIVSLARSHVSSNGGGGGSNEHPLEMPICAFQ |
| | | LPDLTVYNEDERSFIERDLIEQSMLVALEQAGRLNWWVSVDPTS |
| | | QRLLPLATTGDGNCLLHAASLGMWGFHDRDLMLRKALYALMEKG |
| | | VEKEALKRRWRWQQTQQNKESGLVYTEDEWQKEWNELIKLASSE |
| | | PRMHLGTNGANCGGVESSEEPVYESLEEFHVFVLAHVLRRPIVV |
| | | VADTMLRDSGGEAFAPIPEGGIYLPLEVPASQCHRSPLVLAYDQ |
| | | AHFSALVSMEQKENTKEQAVIPLTDSEYKLLPLHFAVDPGKGWE |
| | | WGKDDSDNVRLASVILSLEVKLHLLHSYMNVKWIPLSSDAQAPL |
| | | AQ |

[0340] Each of the constructs in Table 13 was tested as described in Example 3. As shown in FIG. 9, each of the SYNGAP1 targeted nanobodies showed an increase in SYNGAP1 expression of at least 2-fold over the control.

[0341] The invention is not to be limited in scope by the specific embodiments described herein. Indeed, various modifications of the invention in addition to those described will become apparent to those skilled in the art from the foregoing description and accompanying figures. Such modifications are intended to fall within the scope of the appended claims.

[0342] All references (e.g., publications or patents or patent applications) cited herein are incorporated herein by reference in their entireties and for all purposes to the same extent as if each individual reference (e.g., publication or patent or patent application) was specifically and individually indicated to be incorporated by reference in its entirety for all purposes. Other embodiments are within the following claims.

What is claimed is:

1. A fusion protein comprising:
a. an effector domain comprising a catalytic domain of a deubiquitinase, or a functional fragment or functional variant thereof; and
b. a targeting domain comprising a targeting moiety that specifically binds a cytosolic protein.

2. The fusion protein of claim 1, wherein said deubiquitinase is a cysteine protease or a metalloprotease.

3. The fusion protein of claim 2, wherein said deubiquitinase is a cysteine protease.

4. The fusion protein of claim 3, wherein said cysteine protease is a ubiquitin-specific protease (USP), a ubiquitin C-terminal hydrolase (UCH), a Machado-Josephin domain protease (MJD), an ovarian tumour protease (OTU), a MINDY protease, or a ZUFSP protease.

5. The fusion protein of claim 4, wherein said cysteine protease is a USP.

6. The fusion protein of claim 5, wherein said USP is USP1, USP2, USP3, USP4, USP5, USP6, USP7, USP8, USP9X, USP9Y, USP10, USP11, USP12, USP13, USP14, USP15, USP16, USP17, USP17L2, USP17L3, USP17L4, USP17L5, USP17L7, USP17L8, USP18, USP19, USP20, USP21, USP22, USP23, USP24, USP25, USP26, USP27X, USP28, USP29, USP30, USP31, USP32, USP33, USP34, USP35, USP36, USP37, USP38, USP39, USP40, USP41, USP42, USP43, USP44, USP45, or USP46.

7. The fusion protein of claim 4, wherein said cysteine protease is a UCH.

8. The fusion protein of claim 7, wherein said UCH is BAP1, UCHL1, UCHL3, or UCHL5.

9. The fusion protein of claim 4, wherein said cysteine protease is a MJD.

10. The fusion protein of claim 9, wherein said MJD is ATXN3 or ATXN3L.

11. The fusion protein of claim 4, wherein said cysteine protease is an OTU.

12. The fusion protein of claim 11, wherein said OTU is OTUB1 or OTUB2.

13. The fusion protein of claim 4, wherein said cysteine protease is a MINDY.

14. The fusion protein of claim 13, wherein said MINDY MINDY1, MINDY2, MINDY3, or MINDY4.

15. The fusion protein of claim 4, wherein said cysteine protease is a ZUFSP.

16. The fusion protein of claim 15, wherein said ZUFSP is ZUP1.

17. The fusion protein of claim 2, wherein said deubiquitinase is a metalloprotease.

18. The fusion protein of claim 17, wherein said metalloprotease is a Jab1/Mov34/Mpr1 Pad1 N-terminal+(MPN+) (JAMM) domain protease.

19. The fusion protein of any one of the preceding claims, wherein said deubiquitinase comprises an amino acid sequence at least 80%, 81%, 82%, 83%, 84%, 85%, 86%, 87%, 88%, 89%, 90%, 91%, 92%, 93%, 94%, 95%, 96%, 97%, 98%, 99%, or 100% identical to the amino acid sequence of any one of SEQ ID NOS: 1-112.

20. The fusion protein of any one of the preceding claims, wherein said catalytic domain comprises a catalytic domain derived from a deubiquitinase comprising an amino acid sequence at least 80%, 81%, 82%, 83%, 84%, 85%, 86%, 87%, 88%, 89%, 90%, 91%, 92%, 93%, 94%, 95%, 96%, 97%, 98%, 99%, or 100% identical to the amino acid sequence of any one of SEQ ID NOS: 1-112.

21. The fusion protein of any one of the preceding claims, wherein said catalytic domain comprises an amino acid sequence at least 80%, 81%, 82%, 83%, 84%, 85%, 86%, 87%, 88%, 89%, 90%, 91%, 92%, 93%, 94%, 95%, 96%, 97%, 98%, 99%, or 100% identical to the amino acid sequence of any one of SEQ ID NOS: 113-220 or 286.

22. The fusion protein of any one of the preceding claims, wherein said catalytic domain comprises an amino acid sequence at least 80%, 81%, 82%, 83%, 84%, 85%, 86%, 87%, 88%, 89%, 90%, 91%, 92%, 93%, 94%, 95%, 96%, 97%, 98%, 99%, or 100% identical to the amino acid sequence of SEQ ID NO: 286.

23. The fusion protein of any one of the preceding claim, wherein said catalytic domain comprises an amino acid sequence that is a functional fragment of the amino acid sequence of any one of SEQ ID NOS: 1-112.

24. The fusion protein of any one of the preceding claim, wherein said catalytic domain comprises an amino acid sequence that is a functional fragment of the amino acid sequence of any one of SEQ ID NOS: 113-220 or 286.

25. The fusion protein of any one of the preceding claims, wherein said moiety that specifically binds a cytosolic protein comprises an antibody, or functional fragment or functional variant thereof.

26. The fusion protein of claim 25, wherein said antibody, or functional fragment or functional variant thereof, comprises a full-length antibody, a single chain variable fragment (scFv), a scFv2, a scFv-Fc, a Fab, a Fab′, a F(ab′)2, a F(v), a VHH, or a (VHH)₂.

27. The fusion protein of claim 26, wherein said antibody, or functional fragment or functional variant thereof, comprises a VHH or a (VHH)₂.

28. The fusion protein of any one of the preceding claims, wherein said cytosolic protein is cyclin-dependent kinase-like 5 (CDKL5), copper-transporting ATPase 2 (ATP7B), syntaxin-binding protein 1 (STXBP1), Ras/Rap GTPase-activating protein (SYNGAP1), progranulin (GRN), protein jagged-1 (JAG1), GATOR complex protein DEPDC5 (DEPDC5), tuberin (TSC2), hamartin (TSC1), kinesin-like protein KIF1A (KIF1A), dynamin-1 (DNM1), SH3 and multiple ankyrin repeat domains protein 3 (SHANK3), dystrophin (DMD), oxygen-regulated protein 1 (RP1), titin (TTN), cytoplasmic dynein 1 heavy chain 1 (DYNC1H1), TRIO and F-actin-binding protein (TRIO), probable ubiquitin carboxyl-terminal hydrolase FAF-X (USP9X), cystatin-B (CSTB), or pterin-4-alpha-carbinolamine dehydratase (PCBD1).

29. The fusion protein of any one of the preceding claims, wherein said cytosolic protein comprises an amino acid sequence at least 90%, 91%, 92%, 93%, 94%, 95%, 96%, 97%, 98%, 99%, or 100% identical to any one of SEQ ID NOS: 221-328 or 287-289.

30. The fusion protein of any one of the preceding claims, wherein said effector domain is directly operably connected to said targeting domain.

31. The fusion protein of any one of claims 1-29, wherein said effector domain is indirectly operably connected to said targeting domain.

32. The fusion protein of claim 31, wherein said effector domain is indirectly operably connected to said targeting domain via a peptide linker.

33. The fusion protein of claim 32, wherein said effector domain is indirectly fused to said targeting domain via a peptide linker of sufficient length such that said effector domain and said targeting domain can simultaneous bind the respective target proteins.

34. The fusion protein of claim 32 or 33, wherein said peptide linker comprises the amino acid sequence of any one of SEQ ID NOS: 375-384 or 402-519, or the amino acid sequence of any one of SEQ ID NOS: 375-384 or 402-519 comprising 1, 2, or 3 amino acid modifications.

35. The fusion protein of claim 34, wherein said peptide linker comprises the amino acid sequence of any one of SEQ ID NOS: 375-384, or the amino acid sequence of any one of SEQ ID NOS: 375-384 comprising 1, 2, or 3 amino acid modifications.

36. The fusion protein of any one of the preceding claims, wherein said effector domain is operably connected either directly or indirectly to the C terminus of said targeting domain.

37. The fusion protein of any one of claims 1-35, wherein said effector moiety is operably connected either directly or indirectly to the N terminus of said targeting domain.

38. A nucleic acid molecule encoding the fusion protein of any one of claims 1-37.

39. The nucleic acid molecule of claim 38, wherein said nucleic acid molecule is a DNA molecule.

40. The nucleic acid molecule of claim 38, wherein said nucleic acid molecule is an RNA molecule.

41. A vector comprising the nucleic acid molecule of any one of claims 38-40.

42. The vector of claim 41, wherein said vector is a plasmid or a viral vector.

43. A viral particle comprising the nucleic acid molecule of any one of claims 38-40.

44. An in vitro cell or population of cells comprising the fusion protein of any one of claims 1-37, the nucleic acid molecule of any one of claims 38-40, or the vector of any one of claims 41-42.

45. A pharmaceutical composition comprising the fusion protein of any one of claims 1-37, the nucleic acid molecule of any one of claims 38-40, the vector of any one of claims 41-42, or the viral particle of claim 43, and an excipient.

46. A method of making the fusion protein of any one of claims 1-37, comprising
a. introducing into an in vitro cell or population of cells the nucleic acid molecule of any one of claims 38-40, the vector of any one of claims 41-42, the viral particle of claim 43;
b. culturing the cell or population of cells in a culture medium under conditions suitable for expression of the fusion protein,
c. isolating the fusion protein from the culture medium, and
d. optionally purifying the fusion protein.

47. A method of treating or preventing a disease in a subject comprising administering the fusion protein of any one of claims 1-37, the nucleic acid molecule of any one of claims 38-40, the vector of any one of claims 41-42, the viral particle of claim 43, or the pharmaceutical composition of claim 45, to a subject in need thereof.

48. The method of claim 47, wherein the subject is human.

49. The method of claim 47 or 48, wherein said disease is associated with decreased expression of a functional version of the cytosolic protein relative to a non-diseased control.

50. The method of any one of claims 47-49, wherein the disease is associated with decreased stability of a functional version of the cytosolic protein relative to a non-diseased control.

51. The method of any one of claims 47-50, wherein said disease is associated with increased ubiquitination of the cytosolic protein relative to a non-diseased control.

52. The method of any one of claims 47-51, wherein said disease is associated with increased ubiquitination and degradation of the cytosolic protein relative to a non-diseased control.

53. The method of any one of claims 47-52, wherein said disease is a genetic disease.

54. The method of any one of claims 47-53, wherein said disease is SYNGAP1 encephalopathy, CDKL5 deficiency disorder, STXBP1 encephalopathy, early infantile epileptic encephalopathy type 2, Wilson disease, early infantile epileptic encephalopathy type 4, mental retardation autosomal dominant 5, aphasia, alagille syndrome 1, epilepsy, tuberous sclerosis-2, tuberous sclerosis-1, KIF1A-associated neurological disorder, encephalopathy, Phelan-McDermid syndrome, Becker Muscular Dystrophy, RP1, retinitis pigmentosa 1, dilated cardiomyopathy 1G, DYNCIHI Syndrome, TRIO-Related intellectual disability (ID), USP9X Development Disorder, epilepsy, progressive myoclonic 1 (EPM1), or hyperphenylalaninemia BH4-deficient D (HPABH4D).

55. The method of any one of claims 47-54, wherein
a. said target cytosolic protein is SYNGAP1, and said disease is SYNGAP1 encephalopathy;
b. said target cytosolic protein is SYNGAP1, and said disease is Mental retardation autosomal dominant 5.
c. said target cytosolic protein is CDKL5, and said disease is CDKL5 deficiency disorder;
d. said target cytosolic protein is CDKL5, and said disease is an early infantile epileptic encephalopathy
e. said target cytosolic protein is CDKL5, and said disease is early infantile epileptic encephalopathy type 2;
f. said target cytosolic protein is ATP7B, and said disease is Wilson disease;
g. said target cytosolic protein is STXBP1, and said disease is STXBP1 encephalopathy;
h. said target cytosolic protein is STXBP1, and said disease is an early infantile epileptic encephalopathy;
i. said target cytosolic protein is STXBP1, and said disease is early infantile epileptic encephalopathy type 4;
j. said target cytosolic protein is GRN, and said disease is aphasia primary progressive & FTD (frontotemporal degeneration);
k. said target cytosolic protein is JAG1, and said disease is alagille syndrome 1;
l. said target cytosolic protein is DEPDC5, and said disease is epilepsy (e.g., familial focal, with variable foci 1);
m. said target cytosolic protein is TSC2, and said disease is tuberous sclerosis;
n. said target cytosolic protein is TSC2, and said disease is tuberous sclerosis type 2;
o. said target cytosolic protein is TSC2, and said disease is tuberous sclerosis type 1;
p. said target cytosolic protein is TSC1, and said disease is tuberous sclerosis;
q. said target cytosolic protein is TSC1, and said disease is tuberous sclerosis type 1;
r. said target cytosolic protein is TSC1, and said disease is tuberous sclerosis type 2;
s. said target cytosolic protein is KIF1A, and said disease is KIF1A-associated neurological disorder;
t. said target cytosolic protein is DNM1, and said disease is a DNM1 encephalopathy;
u. said target cytosolic protein is DNM1, and said disease is encephalopathy;
v. said target cytosolic protein is SHANK3, and said disease is Phelan-McDermid syndrome;
w. said target cytosolic protein is DMD, and said disease is Becker Muscular Dystrophy;
x. said target cytosolic protein is RP1, and said disease is retinitis pigmentosa 1;
y. said target cytosolic protein is TTN, and said disease is dilated cardiomyopathy 1G;
z. said target cytosolic protein is DYNC1H1, and said disease is DYNC1H1 Syndrome;
aa. said target cytosolic protein is TRIO, and said disease is TRIO-Related intellectual disability (ID);
bb. said target cytosolic protein is USP9X, and said disease is USP9X development disorder;
cc. said target cytosolic protein is CSTB, and the disease is epilepsy, progressive myoclonic 1 (EPM1); or
dd. the target cytosolic protein is PCBD1, and the disease is hyperphenylalaninemia, BH4-deficient, D (HPABH4D).

56. The method of any one of claims 47-55, wherein said disease is a haploinsufficiency disease.

57. The method of any one of claims 47-56, wherein said fusion protein, nucleic acid molecule, vector, viral particle, or pharmaceutical composition is administered at a therapeutically effective dose.

58. The method of any one of claims 47-57, wherein said fusion protein, nucleic acid molecule, vector, viral particle, or pharmaceutical composition is administered systematically or locally.

59. The method of any one of claims 47-58, wherein said fusion protein, nucleic acid molecule, vector, viral particle, or pharmaceutical composition is administered intravenously, subcutaneously, or intramuscularly.

60. The fusion protein of any one of claims 1-37, the polynucleotide of claim 38, the DNA of claim 39, the RNA of claim 40, the vector of any one of claims 41-42, the viral particle of claim 43, or the pharmaceutical composition of claim 45 for use as a medicament.

61. The fusion protein of any one of claims 1-37, the polynucleotide of claim 38, the DNA of claim 39, the RNA of claim 40, the vector of any one of claims 41-42, the viral particle of claim 43, or the pharmaceutical composition of claim 45 for use in treating or inhibiting a genetic disorder.

62. A single variable domain antibody (VHH) that specifically binds SYNGAP1 comprising three complementarity determining regions: CDR1, CDR2, and CDR3, wherein
a. the amino acid sequence of CDR1 comprises the amino acid sequence of SEQ ID NO: 290, 294, 298, 302, 306, or 310, or the amino acid sequence of SEQ ID NO: 290, 294, 298, 302, 306, or 310 comprising 1, 2, or 3 amino acid modifications;
b. the amino acid sequence of CDR2 comprises the amino acid sequence of SEQ ID NO: 291, 295, 299, 303, 307, or 311, or the amino acid sequence of SEQ ID NO: 291, 295, 299, 303, 307, or 311 comprising 1, 2, or 3 amino acid modifications; and/or
c. the amino acid sequence of CDR3 comprises the amino acid sequence of SEQ ID NO: 292, 296, 300, 304, 308, or 312, or the amino acid sequence of SEQ ID NO: 292, 296, 300, 304, 308, or 312 comprising 1, 2, or 3 amino acid modifications.

63. The VHH of claim 62, wherein
a. the amino acid sequence of CDR1 comprises the amino acid sequence of SEQ ID NO: 290, or the amino acid sequence of SEQ ID NO: 290 comprising 1, 2, or 3 amino acid modifications;
b. the amino acid sequence of CDR2 comprises the amino acid sequence of SEQ ID NO: 291, or the amino acid sequence of SEQ ID NO: 291 comprising 1, 2, or 3 amino acid modifications; and/or
c. the amino acid sequence of CDR3 comprises the amino acid sequence of SEQ ID NO: 292, or the amino acid sequence of SEQ ID NO: 292 comprising 1, 2, or 3 amino acid modifications.

64. The VHH of claim 62, wherein
a. the amino acid sequence of CDR1 comprises the amino acid sequence of SEQ ID NO: 294, or the amino acid sequence of SEQ ID NO: 294 comprising 1, 2, or 3 amino acid modifications;
b. the amino acid sequence of CDR2 comprises the amino acid sequence of SEQ ID NO: 295, or the amino acid sequence of SEQ ID NO: 295 comprising 1, 2, or 3 amino acid modifications; and/or
c. the amino acid sequence of CDR3 comprises the amino acid sequence of SEQ ID NO: 296, or the amino acid sequence of SEQ ID NO: 296 comprising 1, 2, or 3 amino acid modifications.

65. The VHH of claim 62, wherein
a. the amino acid sequence of CDR1 comprises the amino acid sequence of SEQ ID NO: 298, or the amino acid sequence of SEQ ID NO: 298 comprising 1, 2, or 3 amino acid modifications;
b. the amino acid sequence of CDR2 comprises the amino acid sequence of SEQ ID NO: 299, or the amino acid sequence of SEQ ID NO: 299 comprising 1, 2, or 3 amino acid modifications; and/or
c. the amino acid sequence of CDR3 comprises the amino acid sequence of SEQ ID NO: 300, or the amino acid sequence of SEQ ID NO: 300 comprising 1, 2, or 3 amino acid modifications.

66. The VHH of claim 62, wherein
a. the amino acid sequence of CDR1 comprises the amino acid sequence of SEQ ID NO: 302, or the amino acid sequence of SEQ ID NO: 302 comprising 1, 2, or 3 amino acid modifications;
b. the amino acid sequence of CDR2 comprises the amino acid sequence of SEQ ID NO: 303, or the amino acid sequence of SEQ ID NO: 303 comprising 1, 2, or 3 amino acid modifications; and/or
c. the amino acid sequence of CDR3 comprises the amino acid sequence of SEQ ID NO: 304, or the amino acid sequence of SEQ ID NO: 304 comprising 1, 2, or 3 amino acid modifications.

67. The VHH of claim 62, wherein
a. the amino acid sequence of CDR1 comprises the amino acid sequence of SEQ ID NO: 306, or the amino acid sequence of SEQ ID NO: 306 comprising 1, 2, or 3 amino acid modifications;
b. the amino acid sequence of CDR2 comprises the amino acid sequence of SEQ ID NO: 307, or the amino acid sequence of SEQ ID NO: 307 comprising 1, 2, or 3 amino acid modifications; and/or
c. the amino acid sequence of CDR3 comprises the amino acid sequence of SEQ ID NO: 308, or the amino acid sequence of SEQ ID NO: 308 comprising 1, 2, or 3 amino acid modifications.

68. The VHH of claim 62, wherein
a. the amino acid sequence of CDR1 comprises the amino acid sequence of SEQ ID NO: 310, or the amino acid sequence of SEQ ID NO: 310 comprising 1, 2, or 3 amino acid modifications;
b. the amino acid sequence of CDR2 comprises the amino acid sequence of SEQ ID NO: 311, or the amino acid sequence of SEQ ID NO: 311 comprising 1, 2, or 3 amino acid modifications; and/or
c. the amino acid sequence of CDR3 comprises the amino acid sequence of SEQ ID NO: 312, or the amino acid sequence of SEQ ID NO: 312 comprising 1, 2, or 3 amino acid modifications.

69. The VHH of any one of claims 62-68, wherein said VHH comprises an amino acid sequence at least 90%, 91%, 92%, 93%, 94%, 95%, 96%, 97%, 98%, 99%, or 100% identical to the amino acid sequence of any one of SEQ ID NOS: 293, 297, 301, 305, 309, or 313.

70. A (VHH)₂ comprising a first VHH that specifically binds SYNGAP1 comprising three complementarity determining regions: CDR1, CDR2, and CDR3, wherein
a. the amino acid sequence of CDR1 comprises the amino acid sequence of SEQ ID NO: 290, 294, 298, 302, 306, or 310, or the amino acid sequence of SEQ ID NO: 290, 294, 298, 302, 306, or 310 comprising 1, 2, or 3 amino acid modifications;
b. the amino acid sequence of CDR2 comprises the amino acid sequence of SEQ ID NO: 291, 295, 299, 303, 307, or 311, or the amino acid sequence of SEQ ID NO: 291, 295, 299, 303, 307, or 311 comprising 1, 2, or 3 amino acid modifications; and/or
c. the amino acid sequence of CDR3 comprises the amino acid sequence of SEQ ID NO: 292, 296, 300, 304, 308, or 312, or the amino acid sequence of SEQ ID NO: 292, 296, 300, 304, 308, or 312 comprising 1, 2, or 3 amino acid modifications; and
a second VHH that specifically binds SYNGAP1 comprising three complementarity determining regions: CDR1, CDR2, and CDR3, wherein
d. the amino acid sequence of CDR1 comprises the amino acid sequence of SEQ ID NO: 290, 294, 298, 302, 306, or 310, or the amino acid sequence of SEQ ID NO: 290, 294, 298, 302, 306, or 310 comprising 1, 2, or 3 amino acid modifications;
e. the amino acid sequence of CDR2 comprises the amino acid sequence of SEQ ID NO: 291, 295, 299, 303, 307, or 311, or the amino acid sequence of SEQ ID NO: 291, 295, 299, 303, 307, or 311 comprising 1, 2, or 3 amino acid modifications; and/or
f. the amino acid sequence of CDR3 comprises the amino acid sequence of SEQ ID NO: 292, 296, 300, 304, 308, or 312, or the amino acid sequence of SEQ ID NO: 292, 296, 300, 304, 308, or 312 comprising 1, 2, or 3 amino acid modifications; wherein the first VHH and the second VHH are directly or indirectly operably connected.

71. The (VHH)₂ of claim 70, wherein the first VHH comprises three CDRs: CDR1, CDR2, and CDR3, wherein
a. the amino acid sequence of CDR1 comprises the amino acid sequence of SEQ ID NO: 290, or the amino acid sequence of SEQ ID NO: 290 comprising 1, 2, or 3 amino acid modifications;
b. the amino acid sequence of CDR2 comprises the amino acid sequence of SEQ ID NO: 291, or the amino acid sequence of SEQ ID NO: 291 comprising 1, 2, or 3 amino acid modifications; and/or
c. the amino acid sequence of CDR3 comprises the amino acid sequence of SEQ ID NO: 292, or the amino acid sequence of SEQ ID NO: 292 comprising 1, 2, or 3 amino acid modifications; and
the second VHH comprises three CDRs: CDR1, CDR2, and CDR3, wherein
d. the amino acid sequence of CDR1 comprises the amino acid sequence of SEQ ID NO: 290, or the amino acid sequence of SEQ ID NO: 290 comprising 1, 2, or 3 amino acid modifications;
e. the amino acid sequence of CDR2 comprises the amino acid sequence of SEQ ID NO: 291, or the amino acid sequence of SEQ ID NO: 291 comprising 1, 2, or 3 amino acid modifications; and/or
f. the amino acid sequence of CDR3 comprises the amino acid sequence of SEQ ID NO: 292, or the amino acid sequence of SEQ ID NO: 292 comprising 1, 2, or 3 amino acid modifications.

72. The (VHH)₂ of claim 70, wherein the first VHH comprises three CDRs: CDR1, CDR2, and CDR3, wherein
a. the amino acid sequence of CDR1 comprises the amino acid sequence of SEQ ID NO: 294, or the amino acid sequence of SEQ ID NO: 294 comprising 1, 2, or 3 amino acid modifications;
b. the amino acid sequence of CDR2 comprises the amino acid sequence of SEQ ID NO: 295, or the amino acid sequence of SEQ ID NO: 295 comprising 1, 2, or 3 amino acid modifications; and/or
c. the amino acid sequence of CDR3 comprises the amino acid sequence of SEQ ID NO: 296, or the amino acid sequence of SEQ ID NO: 296 comprising 1, 2, or 3 amino acid modifications; and
the second VHH comprises three CDRs: CDR1, CDR2, and CDR3, wherein
d. the amino acid sequence of CDR1 comprises the amino acid sequence of SEQ ID NO: 294, or the amino acid sequence of SEQ ID NO: 294 comprising 1, 2, or 3 amino acid modifications;
e. the amino acid sequence of CDR2 comprises the amino acid sequence of SEQ ID NO: 295, or the amino acid sequence of SEQ ID NO: 295 comprising 1, 2, or 3 amino acid modifications; and/or
f. the amino acid sequence of CDR3 comprises the amino acid sequence of SEQ ID NO: 296, or the amino acid sequence of SEQ ID NO: 296 comprising 1, 2, or 3 amino acid modifications.

73. The (VHH)₂ of claim 70, wherein the first VHH comprises three CDRs: CDR1, CDR2, and CDR3, wherein
a. the amino acid sequence of CDR1 comprises the amino acid sequence of SEQ ID NO: 298, or the amino acid sequence of SEQ ID NO: 298 comprising 1, 2, or 3 amino acid modifications;
b. the amino acid sequence of CDR2 comprises the amino acid sequence of SEQ ID NO: 299, or the amino acid sequence of SEQ ID NO: 299 comprising 1, 2, or 3 amino acid modifications; and/or
c. the amino acid sequence of CDR3 comprises the amino acid sequence of SEQ ID NO: 300, or the amino acid sequence of SEQ ID NO: 300 comprising 1, 2, or 3 amino acid modifications; and
the second VHH comprises three CDRs: CDR1, CDR2, and CDR3, wherein
d. the amino acid sequence of CDR1 comprises the amino acid sequence of SEQ ID NO: 298, or the amino acid sequence of SEQ ID NO: 298 comprising 1, 2, or 3 amino acid modifications;
e. the amino acid sequence of CDR2 comprises the amino acid sequence of SEQ ID NO: 299, or the amino acid sequence of SEQ ID NO: 299 comprising 1, 2, or 3 amino acid modifications; and/or
f. the amino acid sequence of CDR3 comprises the amino acid sequence of SEQ ID NO: 300, or the amino acid sequence of SEQ ID NO: 300 comprising 1, 2, or 3 amino acid modifications.

74. The (VHH)₂ of claim 70, wherein the first VHH comprises three CDRs: CDR1, CDR2, and CDR3, wherein
a. the amino acid sequence of CDR1 comprises the amino acid sequence of SEQ ID NO: 302, or the amino acid sequence of SEQ ID NO: 302 comprising 1, 2, or 3 amino acid modifications;
b. the amino acid sequence of CDR2 comprises the amino acid sequence of SEQ ID NO: 303, or the amino acid sequence of SEQ ID NO: 303 comprising 1, 2, or 3 amino acid modifications; and/or
c. the amino acid sequence of CDR3 comprises the amino acid sequence of SEQ ID NO: 304, or the amino acid sequence of SEQ ID NO: 304 comprising 1, 2, or 3 amino acid modifications; and
the second VHH comprises three CDRs: CDR1, CDR2, and CDR3, wherein
d. the amino acid sequence of CDR1 comprises the amino acid sequence of SEQ ID NO: 302, or the amino acid sequence of SEQ ID NO: 302 comprising 1, 2, or 3 amino acid modifications;
e. the amino acid sequence of CDR2 comprises the amino acid sequence of SEQ ID NO: 303, or the amino acid sequence of SEQ ID NO: 303 comprising 1, 2, or 3 amino acid modifications; and/or
f. the amino acid sequence of CDR3 comprises the amino acid sequence of SEQ ID NO: 304, or the amino acid sequence of SEQ ID NO: 304 comprising 1, 2, or 3 amino acid modifications.

75. The (VHH)₂ of claim 70, wherein the first VHH comprises three CDRs: CDR1, CDR2, and CDR3, wherein
a. the amino acid sequence of CDR1 comprises the amino acid sequence of SEQ ID NO: 306, or the amino acid sequence of SEQ ID NO: 306 comprising 1, 2, or 3 amino acid modifications;
b. the amino acid sequence of CDR2 comprises the amino acid sequence of SEQ ID NO: 307, or the amino acid sequence of SEQ ID NO: 307 comprising 1, 2, or 3 amino acid modifications; and/or
c. the amino acid sequence of CDR3 comprises the amino acid sequence of SEQ ID NO: 308, or the amino acid sequence of SEQ ID NO: 308 comprising 1, 2, or 3 amino acid modifications; and
the second VHH comprises three CDRs: CDR1, CDR2, and CDR3, wherein
d. the amino acid sequence of CDR1 comprises the amino acid sequence of SEQ ID NO: 306, or the amino acid sequence of SEQ ID NO: 306 comprising 1, 2, or 3 amino acid modifications;
e. the amino acid sequence of CDR2 comprises the amino acid sequence of SEQ ID NO: 307, or the amino acid sequence of SEQ ID NO: 307 comprising 1, 2, or 3 amino acid modifications; and/or
f. the amino acid sequence of CDR3 comprises the amino acid sequence of SEQ ID NO: 308, or the amino acid sequence of SEQ ID NO: 308 comprising 1, 2, or 3 amino acid modifications.

76. The (VHH)₂ of claim 70, wherein the first VHH comprises three CDRs: CDR1, CDR2, and CDR3, wherein
a. the amino acid sequence of CDR1 comprises the amino acid sequence of SEQ ID NO: 310, or the amino acid sequence of SEQ ID NO: 310 comprising 1, 2, or 3 amino acid modifications;
b. the amino acid sequence of CDR2 comprises the amino acid sequence of SEQ ID NO: 311, or the amino acid sequence of SEQ ID NO: 311 comprising 1, 2, or 3 amino acid modifications; and/or
c. the amino acid sequence of CDR3 comprises the amino acid sequence of SEQ ID NO: 312, or the amino acid sequence of SEQ ID NO: 312 comprising 1, 2, or 3 amino acid modifications; and
the second VHH comprises three CDRs: CDR1, CDR2, and CDR3, wherein
d. the amino acid sequence of CDR1 comprises the amino acid sequence of SEQ ID NO: 310, or the amino acid sequence of SEQ ID NO: 310 comprising 1, 2, or 3 amino acid modifications;
e. the amino acid sequence of CDR2 comprises the amino acid sequence of SEQ ID NO: 311, or the amino acid sequence of SEQ ID NO: 311 comprising 1, 2, or 3 amino acid modifications; and/or
f. the amino acid sequence of CDR3 comprises the amino acid sequence of SEQ ID NO: 312, or the amino acid sequence of SEQ ID NO: 312 comprising 1, 2, or 3 amino acid modifications.

77. The (VHH)₂ of any one of claim 70, wherein said first VHH comprises an amino acid sequence at least 90%, 91%, 92%, 93%, 94%, 95%, 96%, 97%, 98%, 99%, or 100% identical to the amino acid sequence of any one of SEQ ID NOS: 293, 297, 301, 305, 309, or 313; and said second VHH comprises an amino acid sequence at least 90%, 91%, 92%, 93%, 94%, 95%, 96%, 97%, 98%, 99%, or 100% identical to the amino acid sequence of any one of SEQ ID NOS: 293, 297, 301, 305, 309, or 313.

78. The (VHH)₂ of any one of claim 70, wherein
a. said first VHH comprises an amino acid sequence at least 90%, 91%, 92%, 93%, 94%, 95%, 96%, 97%, 98%, 99%, or 100% identical to the amino acid sequence of SEQ ID NO: 293; and said second VHH comprises an amino acid sequence at least 90%, 91%, 92%, 93%, 94%, 95%, 96%, 97%, 98%, 99%, or 100% identical to the amino acid sequence of SEQ ID NO: 293;
b. said first VHH comprises an amino acid sequence at least 90%, 91%, 92%, 93%, 94%, 95%, 96%, 97%, 98%, 99%, or 100% identical to the amino acid sequence of SEQ ID NO: 297; and said second VHH comprises an amino acid sequence at least 90%, 91%, 92%, 93%, 94%, 95%, 96%, 97%, 98%, 99%, or 100% identical to the amino acid sequence of SEQ ID NO: 297;
c. said first VHH comprises an amino acid sequence at least 90%, 91%, 92%, 93%, 94%, 95%, 96%, 97%, 98%, 99%, or 100% identical to the amino acid sequence of SEQ ID NO: 301; and said second VHH comprises an amino acid sequence at least 90%, 91%, 92%, 93%, 94%, 95%, 96%, 97%, 98%, 99%, or 100% identical to the amino acid sequence of SEQ ID NO: 301;
d. said first VHH comprises an amino acid sequence at least 90%, 91%, 92%, 93%, 94%, 95%, 96%, 97%, 98%, 99%, or 100% identical to the amino acid sequence of SEQ ID NO: 305; and said second VHH comprises an amino acid sequence at least 90%, 91%, 92%, 93%, 94%, 95%, 96%, 97%, 98%, 99%, or 100% identical to the amino acid sequence of SEQ ID NO: 305;
e. said first VHH comprises an amino acid sequence at least 90%, 91%, 92%, 93%, 94%, 95%, 96%, 97%, 98%, 99%, or 100% identical to the amino acid sequence of SEQ ID NO: 309; and said second VHH comprises an amino acid sequence at least 90%, 91%, 92%, 93%, 94%, 95%, 96%, 97%, 98%, 99%, or 100% identical to the amino acid sequence of SEQ ID NO: 309; or
f. said first VHH comprises an amino acid sequence at least 90%, 91%, 92%, 93%, 94%, 95%, 96%, 97%, 98%, 99%, or 100% identical to the amino acid sequence of SEQ ID NO: 313; and said second VHH comprises an amino acid sequence at least 90%, 91%, 92%, 93%, 94%, 95%, 96%, 97%, 98%, 99%, or 100% identical to the amino acid sequence of SEQ ID NO: 313.

79. The (VHH)₂ of any one of claims 62-78, wherein said first VHH is operably connected to said second VHH via a peptide linker.

80. The (VHH)₂ of claim 62-78, wherein said peptide linker comprises the amino acid sequence of any one of SEQ ID NOS: 375-384 or 402-519, or the amino acid sequence of any one of SEQ ID NOS: 375-384 or 402-519 comprising 1, 2, or 3 amino acid modifications.

81. The (VHH)₂ of claim 80, wherein said peptide linker comprises the amino acid sequence of any one of SEQ ID NOS: 375-384, or the amino acid sequence of any one of SEQ ID NOS:
375-384 comprising 1, 2, or 3 amino acid modifications.

82. The (VHH)₂ of any one of claims 70-81, wherein said (VHH)₂ comprises an amino acid sequence at least 80%, 81%, 82%, 83%, 84%, 85%, 86%, 87%, 88%, 89%, 90%, 95%, 96%, 97%, 98%, 99%, or 100% identical to the amino acid sequence of any one of SEQ ID NOS: 314-319.

83. A nucleic acid molecule encoding the VHH of any one of claims 62-69 or the (VHH)₂ of any one of claims 70-82.

84. The nucleic acid molecule of claim 83, wherein said nucleic acid molecule is a DNA molecule.

85. The nucleic acid molecule of claim 83, wherein said nucleic acid molecule is an RNA molecule.

86. A vector comprising the nucleic acid molecule of any one of claims 83-85.

87. The vector of claim 86, wherein said vector is a plasmid or a viral vector.

88. A viral particle comprising the nucleic acid molecule of any one of claims 83-85

89. An in vitro cell or population of cells comprising the VHH of any one of claims 62-69 or the (VHH)₂ of any one of claims 70-82, the nucleic acid molecule of any one of claims 83-85, or the vector of any one of claims 86-87.

90. A pharmaceutical composition comprising the VHH of any one of claims 62-69 or the (VHH)₂ of any one of claims 70-82, the nucleic acid molecule of any one of claims 83-85, the vector of any one of claims 86-87, or the viral particle of claim 88, and an excipient.

91. A method of making the VHH of any one of claims 62-69 or the (VHH)₂ of any one of claims 70-82, comprising
a. introducing into an in vitro cell or population of cells the nucleic acid molecule of any one of claims 83-85, the vector of any one of claims 86-87, the viral particle of claim 88;
b. culturing the cell or population of cells in a culture medium under conditions suitable for expression of the fusion protein,
c. isolating the fusion protein from the culture medium, and
d. optionally purifying the fusion protein.

92. The fusion protein of any one of claims 1-37, wherein said targeting domain comprises a VHH of any one of claims 62-69, or a (VHH)₂ of any one of claims 70-82.

93. The fusion protein of claim 92, wherein said catalytic domain comprises an amino acid sequence at least 80%, 81%, 82%, 83%, 84%, 85%, 86%, 87%, 88%, 89%90%, 91%, 92%, 93%, 94%, 95%, 96%, 97%, 98%, 99%, or 100% identical to the amino acid sequence of SEQ ID NO: 286.

94. The fusion protein of any one of claims 92-93, wherein said effector domain is indirectly fused to said targeting domain via a peptide linker of sufficient length such that said effector domain and said targeting domain can simultaneous bind the respective target proteins.

95. The fusion protein of claim 94, wherein said peptide linker comprises the amino acid sequence of any one of SEQ ID NOS: 375-384 or 402-519, or the amino acid sequence of any one of SEQ ID NOS: 375-384 or 402-519 comprising 1, 2, or 3 amino acid modifications.

96. The fusion protein of claim 95, wherein said peptide linker comprises the amino acid sequence of any one of SEQ ID NOS: 375-384, or the amino acid sequence of any one of SEQ ID NOS: 375-384 comprising 1, 2, or 3 amino acid modifications.

97. The fusion protein of any one of claims 92-96, wherein said effector domain is operably connected either directly or indirectly to the C terminus of said targeting domain.

98. The fusion protein of any one of claims 92-97, wherein said effector moiety is operably connected either directly or indirectly to the N terminus of said targeting domain.

99. The fusion protein of any one of claims 9-98, wherein said fusion protein comprises an amino acid sequence at least at least 80%, 81%, 82%, 83%, 84%, 85%, 86%, 87%, 88%, 89%90%, 91%, 92%, 93%, 94%, 95%, 96%, 97%, 98%, 99%, or 100% identical to the amino acid sequence of any one of SEQ ID NOS: 320-367.

100. A nucleic acid molecule encoding the fusion protein of any one of claims 92-99.

101. The nucleic acid molecule of claim 100, wherein said nucleic acid molecule is a DNA molecule.

102. The nucleic acid molecule of claim 100, wherein said nucleic acid molecule is an RNA molecule.

103. A vector comprising the nucleic acid molecule of any one of claims 99-102.

104. The vector of claim 103, wherein said vector is a plasmid or a viral vector.

105. A viral particle comprising the nucleic acid molecule of any one of claims 99-102.

106. An in vitro cell or population of cells comprising the fusion protein of any one of claims 92-99, the nucleic acid molecule of any one of claims 100-102, or the vector of any one of claims 103-104.

107. A pharmaceutical composition comprising the fusion protein of any one of claims 92-99, the nucleic acid molecule of any one of claims 100-102, the vector of any one of claims 103-104, or the viral particle of claim 105, and an excipient.

108. A method of making the fusion protein of any one of claims 92-99, comprising
a. introducing into an in vitro cell or population of cells the nucleic acid molecule of any one of claims 100-102, the vector of any one of claims 103-104, the viral particle of claim 105;
b. culturing the cell or population of cells in a culture medium under conditions suitable for expression of the fusion protein,
c. isolating the fusion protein from the culture medium, and
d. optionally purifying the fusion protein.

109. A method of treating or preventing a disease in a subject comprising administering the fusion protein of any one of claims 92-99, the nucleic acid molecule of any one of claims 100-102, the vector of any one of claims 103-104, the viral particle of claim 105, or the pharmaceutical composition of claim 107, to a subject in need thereof.

110. The method of claim 109, wherein the subject is human.

111. The method of any one of claims 109-110, wherein said disease is SYNGAP1 encephalopathy.

112. The method of any one of claims 108-110, wherein said fusion protein, nucleic acid molecule, vector, viral particle, or pharmaceutical composition is administered at a therapeutically effective dose.

113. The method of any one of claims 109-112, wherein said fusion protein, nucleic acid molecule, vector, viral particle, or pharmaceutical composition is administered systematically or locally.

114. The method of any one of claims 109-113, wherein said fusion protein, nucleic acid molecule, vector, viral particle, or pharmaceutical composition is administered intravenously, subcutaneously, or intramuscularly.

115. The fusion protein of any one of claims 92-99, the polynucleotide of claim 100, the DNA of claim 101, the RNA of claim 102, the vector of any one of claims 103-104, the viral particle of claim 105, or the pharmaceutical composition of claim 107 for use as a medicament.

116. The fusion protein of any one of claims 92-99, the polynucleotide of claim 100, the DNA of claim 101, the RNA of claim 102, the vector of any one of claims 103-104, the viral particle of claim 105, or the pharmaceutical composition of claim 107 for use in treating or inhibiting a genetic disorder.

The application's sequence listing, which the Patent Office published only in electronic form, follows.

SEQUENCE LISTING (523 sequences)

SEQ ID NO: 1 - protein, 438 aa, Homo sapiens
MCKDYVYDKDIEQIAKEEQGEALKLQASTSTEVSHQQCSVPGLGEKFPTWETTKPELELLGHNPRRRRITSSFTIGLRGLINLGNTCFMNCIVQALTHTPILRDFFLSDRHRCEMPSPELCLVCEMSSLFRELYSGNPSPHVPYKLLHLVWIHARHLAGYRQQDAHEFLIAALDVLHRHCKGDDVGKAANNPNHCNCIIDQIFTGGLQSDVTCQACHGVSTTIDPCWDISLDLPGSCTSFWPMSPGRESSVNGESHIPGITTLTDCLRRFTRPEHLGSSAKIKCGSCQSYQESTKQLTMNKLPVVACFHFKRFEHSAKQRRKITTYISFPLELDMTPFMASSKESRMNGQLQLPTNSGNNENKYSLFAVVNHQGTLESGHYTSFIRHHKDQWFKCDDAVITKASIKDVLDSEGYLLFYHKQVLEHESEKVKEMNTQAY

SEQ ID NO: 2 - protein, 1035 aa, Homo sapiens
MAPRLQLEKAAWRWAETVRPEEVSQEHIETAYRIWLEPCIRGVCRRNCKGNPNCLVGIGEHIWLGEIDENSFHNIDDPNCERRKKNSFVGLTNLGATCYVNTFLQVWFLNLELRQALYLCPSTCSDYMLGDGIQEEKDYEPQTICEHLQYLFALLQNSNRRYIDPSGFVKALGLDTGQQQDAQEFSKLFMSLLEDTLSKQKNPDVRNIVQQQFCGEYAYVTVCNQCGRESKLLSKFYELELNIQGHKQLTDCISEFLKEEKLEGDNRYFCENCQSKQNATRKIRLLSLPCTLNLQLMRFVFDRQTGHKKKLNTYIGFSEILDMEPYVEHKGGSYVYELSAVLIHRGVSAYSGHYIAHVKDPQSGEWYKFNDEDIEKMEGKKLQLGIEEDLAEPSKSQTRKPKCGKGTHCSRNAYMLVYRLQTQEKPNTTVQVPAFLQELVDRDNSKFEEWCIEMAEMRKQSVDKGKAKHEEVKELYQRLPAGAEPYEFVSLEWLQKWLDESTPTKPIDNHACLCSHDKLHPDKISIMKRISEYAADIFYSRYGGGPRLTVKALCKECVVERCRILRLKNQLNEDYKTVNNLLKAAVKGSDGFWVGKSSLRSWRQLALEQLDEQDGDAEQSNGKMNGSTLNKDESKEERKEEEELNFNEDILCPHGELCISENERRLVSKEAWSKLQQYFPKAPEFPSYKECCSQCKILEREGEENEALHKMIANEQKTSLPNLFQDKNRPCLSNWPEDTDVLYIVSQFFVEEWRKFVRKPTRCSPVSSVGNSALLCPHGGLMFTFASMTKEDSKLIALIWPSEWQMIQKLFVVDHVIKITRIEVGDVNPSETQYISEPKLCPECREGLLCQQQRDLREYTQATIYVHKVVDNKKVMKDSAPELNVSSSETEEDKEEAKPDGEKDPDFNQSNGGTKRQKISHQNYIAYQKQVIRRSMRHRKVRGEKALLVSANQTLKELKIQIMHAFSVAPFDQNLSIDGKILSDDCATLGTLGVIPESVILLKADEPIADYAAMDDVMQVCMPEEGFKGTGLLGH

SEQ ID NO: 3 - protein, 520 aa, Homo sapiens
MECPHLSSSVCIAPDSAKFPNGSPSSWCCSVCRSNKSPWVCLTCSSVHCGRYVNGHAKKHYEDAQVPLTNHKKSEKQDKVQHTVCMDCSSYSTYCYRCDDFVVNDTKLGLVQKVREHLQNLENSAFTADRHKKRKLLENSTLNSKLLKVNGSTTAICATGLRNLGNTCFMNAILQSLSNIEQFCCYFKELPAVELRNGKTAGRRTYHTRSQGDNNVSLVEEFRKTLCALWQGSQTAFSPESLFYVVWKIMPNFRGYQQQDAHEFMRYLLDHLHLELQGGFNGVSRSAILQENSTLSASNKCCINGASTVVTAIFGGILQNEVNCLICGTESRKFDPFLDLSLDIPSQFRSKRSKNQENGPVCSLRDCLRSFTDLEELDETELYMCHKCKKKQKSTKKFWIQKLPKVLCLHLKRFHWTAYLRNKVDTYVEFPLRGLDMKCYLLEPENSGPESCLYDLAAVVVHHGSGVGSGHYTAYATHEGRWFHFNDSTVTLTDEETVVKAKAYILFYVEHQAKAGSDKL

SEQ ID NO: 4 - protein, 470 aa, Homo sapiens
QLAPREKLPLSSRRPAAVGAGLQNMGNTCYVNASLQCLTYTPPLANYMLSREHSQTCHRHKGCMLCTMQAHITRALHNPGHVIQPSQALAAGFHRGKQEDAHEFLMFTVDAMKKACLPGHKQVDHHSKDTTLIHQIFGGYWRSQIKCLHCHGISDTFDPYLDIALDIQAAQSVQQALEQLVKPEELNGENAYHCGVCLQRAPASKTLTLHTSAKVLILVLKRFSDVTGNKIAKNVQYPECLDMQPYMSQTNTGPLVYVLYAVLVHAGWSCHNGHYFSYVKAQEGQWYKMDDAEVTASSITSVLSQQAYVLFYIQKSEWERHSESVSRGREPRALGAEDTDRRATQGELKRDHPCLQAPELDEHLVERATQESTLDHWKFLQEQNKTKPEFNVRKVEGTLPPDVLVIHQSKYKCGMKNHHPEQQSSLLNLSSTTPTHQESMNTGTLASLRGRARRSKGKNKHSKRALLVCQ

SEQ ID NO: 5 - protein, 785 aa, Homo sapiens
MPGVIPSESNGLSRGSPSKKNRLSLKFFQKKETKRALDFTDSQENEEKASEYRASEIDQVVPAAQSSPINCEKRENLLPFVGLNNLGNTCYLNSILQVLYFCPGFKSGVKHLFNIISRKKEALKDEANQKDKGNCKEDSLASYELICSLQSLIISVEQLQASFLLNPEKYTDELATQPRRLLNTLRELNPMYEGYLQHDAQEVLQCILGNIQETCQLLKKEEVKNVAELPTKVEEIPHPKEEMNGINSIEMDSMRHSEDFKEKLPKGNGKRKSDTEFGNMKKKVKLSKEHQSLEENQRQTRSKRKATSDTLESPPKIIPKYISENESPRPSQKKSRVKINWLKSATKQPSILSKFCSLGKITTNQGVKGQSKENECDPEEDLGKCESDNTTNGCGLESPGNTVTPVNVNEVKPINKGEEQIGFELVEKLFQGQLVLRTRCLECESLTERREDFQDISVPVQEDELSKVEESSEISPEPKTEMKTLRWAISQFASVERIVGEDKYFCENCHHYTEAERSLLFDKMPEVITIHLKCFAASGLEFDCYGGGLSKINTPLLTPLKLSLEEWSTKPTNDSYGLFAVVMHSGITISSGHYTASVKVTDLNSLELDKGNFVVDQMCEIGKPEPLNEEEARGVVENYNDEEVSIRVGGNTQPSKVLNKKNVEAIGLLGGQKSKADYELYNKASNPDKVASTAFAENRNSETSDTTGTHESDRNKESSDQTGINISGFENKISYVVQSLKEYEGKWLLFDDSEVKVTEEKDFLNSLSPSTSPTSTPYLLFYKKL

SEQ ID NO: 6 - protein, 1235 aa, Homo sapiens
MFGDLFEEEYSTVSNNQYGKGKKLKTKALEPPAPREFTNLSGIRNQGGTCYLNSLLQTLHFTPEFREALFSLGPEELGLFEDKDKPDAKVRIIPLQLQRLFAQLLLLDQEAASTADLTDSFGWTSNEEMRQHDVQELNRILFSALETSLVGTSGHDLIYRLYHGTIVNQIVCKECKNVSERQEDFLDLTVAVKNVSGLEDALWNMYVEEEVFDCDNLYHCGTCDRLVKAAKSAKLRKLPPFLTVSLLRFNFDFVKCERYKETSCYTFPLRINLKPFCEQSELDDLEYIYDLFSVIIHKGGCYGGHYHVYIKDVDHLGNWQFQEEKSKPDVNLKDLQSEEEIDHPLMILKAILLEENNLIPVDQLGQKLLKKIGISWNKKYRKQHGPLRKFLQLHSQIFLLSSDESTVRLLKNSSLQAESDFQRNDQQIFKMLPPESPGLNNSISCPHWFDINDSKVQPIREKDIEQQFQGKESAYMLFYRKSQLQRPPEARANPRYGVPCHLLNEMDAANIELQTKRAECDSANNTFELHLHLGPQYHFFNGALHPVVSQTESVWDLTFDKRKTLGDLRQSIFQLLEFWEGDMVLSVAKLVPAGLHIYQSLGGDELTLCETEIADGEDIFVWNGVEVGGVHIQTGIDCEPLLLNVLHLDTSSDGEKCCQVIESPHVFPANAEVGTVLTALAIPAGVIFINSAGCPGGEGWTAIPKEDMRKTFREQGLRNGSSILIQDSHDDNSLLTKEEKWVTSMNEIDWLHVKNLCQLESEEKQVKISATVNTMVFDIRIKAIKELKLMKELADNSCLRPIDRNGKLLCPVPDSYTLKEAELKMGSSLGLCLGKAPSSSQLFLFFAMGSDVQPGTEMEIVVEETISVRDCLKLMLKKSGLQGDAWHLRKMDWCYEAGEPLCEEDATLKELLICSGDTLLLIEGQLPPLGFLKVPIWWYQLQGPSGHWESHQDQTNCTSSWGRVWRATSSQGASGNEPAQVSLLYLGDIEISEDATLAELKSQAMTLPPFLEFGVPSPAHLRAWTVERKRPGRLLRTDRQPLREYKLGRRIEICLEPLQKGENLGPQDVLLRTQVRIPGERTYAPALDLVWNAAQGGTAGSLRQRVADFYRLPVEKIEIAKYFPEKFEWLPISSWNQQITKRKKKKKQDYLQGAPYYLKDGDTIGVKNLLIDDDDDFSTIRDDTGKEKQKQRALGRRKSQEALHEQSSYILSSAETPARPRAPETSLSIHVGSFR

SEQ ID NO: 7 - protein, 1102 aa, Homo sapiens
MNHQQQQQQQKAGEQQLSEPEDMEMEAGDTDDPPRITQNPVINGNVALSDGHNTAEEDMEDDTSWRSEATFQFTVERFSRLSESVLSPPCFVRNLPWKIMVMPRFYPDRPHQKSVGFFLQCNAESDSTSWSCHAQAVLKIINYRDDEKSFSRRISHLFFHKENDWGFSNFMAWSEVTDPEKGFIDDDKVTFEVFVQADAPHGVAWDSKKHTGYVGLKNQGATCYMNSLLQTLFFTNQLRKAVYMMPTEGDDSSKSVPLALQRVFYELQHSDKPVGTKKLTKSFGWETLDSFMQHDVQELCRVLLDNVENKMKGTCVEGTIPKLFRGKMVSYIQCKEVDYRSDRREDYYDIQLSIKGKKNIFESFVDYVAVEQLDGDNKYDAGEHGLQEAEKGVKFLTLPPVLHLQLMRFMYDPQTDQNIKINDRFEFPEQLPLDEFLQKTDPKDPANYILHAVLVHSGDNHGGHYVVYLNPKGDGKWCKFDDDVVSRCTKEEAIEHNYGGHDDDLSVRHCTNAYMLVYIRESKLSEVLQAVTDHDIPQQLVERLQEEKRIEAQKRKERQEAHLYMQVQIVAEDQFCGHQGNDMYDEEKVKYTVFKVLKNSSLAEFVQSLSQTMGFPQDQIRLWPMQARSNGTKRPAMLDNEADGNKTMIELSDNENPWTIFLETVDPELAASGATLPKFDKDHDVMLFLKMYDPKTRSLNYCGHIYTPISCKIRDLLPVMCDRAGFIQDTSLILYEEVKPNLTERIQDYDVSLDKALDELMDGDIIVFQKDDPENDNSELPTAKEYFRDLYHRVDVIFCDKTIPNDPGFVVTLSNRMNYFQVAKTVAQRLNTDPMLLQFFKSQGYRDGPGNPLRHNYEGTLRDLLQFFKPRQPKKLYYQQLKMKITDFENRRSFKCIWLNSQFREEEITLYPDKHGCVRDLLEECKKAVELGEKASGKLRLLEIVSYKIIGVHQEDELLECLSPATSRTFRIEEIPLDQVDIDKENEMLVTVAHFHKEVFGTFGIPFLLRIHQGEHFREVMKRIQSLLDIQEKEFEKFKFAIVMMGRHQYINEDEYEVNLKDFEPQPGNMSHPRPWLGLDHFNKAPKRSRYTYLEKAIKIHN

SEQ ID NO: 8 - protein, 530 aa, Homo sapiens
MEDDSLYLRGEWQFNHFSKLTSSRPDAAFAEIQRTSLPEKSPLSCETRVDLCDDLAPVARQLAPREKLPLSSRRPAAVGAGLQNMGNTCYVNASLQCLTYTPPLANYMLSREHSQTCHRHKGCMLCTMQAHITRALHNPGHVIQPSQALAAGFHRGKQEDAHEFLMFTVDAMKKACLPGHKQVDHHSKDTTLIHQIFGGYWRSQIKCLHCHGISDTFDPYLDIALDIQAAQSVQQALEQLAKPEELNGENAYHCGVCLQRAPASKTLTLHTSAKVLILVLKRFSDVTGNKIAKNVQYPECLDMQPYMSQPNTGPLVYVLYAVLVHAGWSCHNGHYFSYVKAQEGQWYKMDDAEVTASSITSVLSQQAYVLFYIQKSEWERHSESVSRGREPRALGAEDTDRRATQGELKRDHPCLQAPELDEHLVERATQESTLDHWKFLQEQNKTKPEFNVRKVEGTLPPDVLVIHQSKYKCGMKNHHPEQQSSLLNLSSSTPTHQESMNTGTLASLRGRARRSKGKNKHSKRALLVCQ

SEQ ID NO: 9 - protein, 530 aa, Homo sapiens
MEEDSLYLGGEWQFNHFSKLTSSRPDAAFAEIQRTSLPEKSPLSCETRVDLCDDLAPVARQLAPREKLPLSNRRPAAVGAGLQNMGNTCYVNASLQCLTYTPPLANYMLSREHSQTCHRHKGCMLCTMQAHITRALHNPGHVIQPSQALAAGFHRGKQEDAHEFLMFTVDAMKKACLPGHKQVDHHSKDTTLIHQIFGGYWRSQIKCLHCHGISDTFDPYLDIALDIQAAQSVQQALEQLVKPEELNGENAYHCGVCLQRAPASKMLTLLTSAKVLILVLKRFSDVTGNKIAKNVQYPECLDMQPYMSQPNTGPLVYVLYAVLVHAGWSCHNGHYFSYVKAQEGQWYKMDDAEVTASSITSVLSQQAYVLFYIQKSEWERHSESVSRGREPRALGAEDTDRRATQGELKRDHPCLQAPELDEHLVERATQESTLDHWKFLQEQNKTKPEFNVRKVEGTLPPDVLVIHQSKYKCGMKNHHPEQQSSLLNLSSSTPTHQESMNTGTLASLRGRARRSKGKNKHSKRALLVCQ

SEQ ID NO: 10 - protein, 530 aa, Homo sapiens
MEDDSLYLGGEWQFNHFSKLTSSRPDAAFAEIQRTSLPEKSPLSCETRVDLCDDLAPVARQLAPREKPPLSSRRPAAVGAGLQNMGNTCYVNASLQCLTYKPPLANYMLFREHSQTCHRHKGCMLCTMQAHITRALHIPGHVIQPSQALAAGFHRGKQEDAHEFLMFTVDAMRKACLPGHKQVDRHSKDTTLIHQIFGGYWRSQIKCLHCHGISDTFDPYLDIALDIQAAQSVQQALEQLVKPEELNGENAYHCGVCLQRAPASKTLTLHNSAKVLILVLKRFPDVTGNKIAKNVQYPECLDMQPYMSQQNTGPLVYVLYAVLVHAGWSCHNGHYSSYVKAQEGQWYKMDDAEVTASSITSVLSQQAYVLFYIQKSEWERHSESVSRGREPRALGVEDTDRRATQGELKRDHPCLQAPELDEHLVERATQESTLDHWKFLQEQNKTKPEFNVRRVEGTVPPDVLVIHQSKYKCRMKNHHPEQQSSLLNLSSTTPTDQESMNTGTLASLRGRTRRSKGKNKHSKRALLVCQ

SEQ ID NO: 11 - protein, 358 aa, Homo sapiens
MDGVLFRAHQCQYVHPCVHVYVTVGLMDPLCERKEKASKQERENPLAHLAAWGLVGLHNIGQTCCLNSLIQVFVMNVDFARILKRITVPRGADEQRRSVPFQMLLLLEKMQDSRQKAVWPLELAYCLQKYNVPLFVQHDAAQLYLKLWNLIKDQIADVHLVERLQALYMIRMKDSLICLDCAMESSRNSSMLTLRLSFFDVDSKPLKTLEDALHCFFQPRELSSKSKCFCENCGKKTRGKQVLKLTHLPQTLTIHLMRFSIRNSQTRKICHSLYFPQSLDFSQILPMKRESCDAEEQSGGQYELFAVIAHVGMADSGHYCVYIRNAVDGKWFCFNDSNICLVSWEDIQCTYGNPNYHW

SEQ ID NO: 12 - protein, 1042 aa, Homo sapiens
MDKILEGLVSSSHPLPLKRVIVRKVVESAEHWLDEAQCEAMFDLTTRLILEGQDPFQRQVGHQVLEAYARYHRPEFESFFNKTFVLGLLHQGYHSLDRKDVAILDYIHNGLKLIMSCPSVLDLFSLLQVEVLRMVCERPEPQLCARLSDLLTDFVQCIPKGKLSITFCQQLVRTIGHFQCVSTQERELREYVSQVTKVSNLLQNIWKAEPATLLPSLQEVFASISSTDASFEPSVALASLVQHIPLQMITVLIRSLTTDPNVKDASMTQALCRMIDWLSWPLAQHVDTWVIALLKGLAAVQKFTILIDVTLLKIELVFNRLWFPLVRPGALAVLSHMLLSFQHSPEAFHLIVPHVVNLVHSFKNDGLPSSTAFLVQLTELIHCMMYHYSGFPDLYEPILEAIKDFPKPSEEKIKLILNQSAWTSQSNSLASCLSRLSGKSETGKTGLINLGNTCYMNSVIQALFMATDFRRQVLSLNLNGCNSLMKKLQHLFAFLAHTQREAYAPRIFFEASRPPWFTPRSQQDCSEYLRFLLDRLHEEEKILKVQASHKPSEILECSETSLQEVASKAAVLTETPRTSDGEKTLIEKMFGGKLRTHIRCLNCRSTSQKVEAFTDLSLAFCPSSSLENMSVQDPASSPSIQDGGLMQASVPGPSEEPVVYNPTTAAFICDSLVNEKTIGSPPNEFYCSENTSVPNESNKILVNKDVPQKPGGETTPSVTDLLNYFLAPEILTGDNQYYCENCASLQNAEKTMQITEEPEYLILTLLRFSYDQKYHVRRKILDNVSLPLVLELPVKRITSFSSLSESWSVDVDFTDLSENLAKKLKPSGTDEASCTKLVPYLLSSVVVHSGISSESGHYYSYARNITSTDSSYQMYHQSEALALASSQSHLLGRDSPSAVFEQDLENKEMSKEWFLFNDSRVTFTSFQSVQKITSRFPKDTAYVLLYKKQHSTNGLSGNNPTSGLWINGDPPLQKELMDAITKDNKLYLQEQELNARARALQAASASCSFRPNGFDDNDPPGSCGPTGGGGGGGFNTVGRLVF

SEQ ID NO: 13 - protein, 1123 aa, Homo sapiens
MDLGPGDAAGGGPLAPRPRRRRSLRRLFSRFLLALGSRSRPGDSPPRPQPGHCDGDGEGGFACAPGPVPAAPGSPGEERPPGPQPQLQLPAGDGARPPGAQGLKNHGNTCFMNAVVQCLSNTDLLAEFLALGRYRAAPGRAEVTEQLAALVRALWTREYTPQLSAEFKNAVSKYGSQFQGNSQHDALEFLLWLLDRVHEDLEGSSRGPVSEKLPPEATKTSENCLSPSAQLPLGQSFVQSHFQAQYRSSLTCPHCLKQSNTFDPFLCVSLPIPLRQTRFLSVTLVFPSKSQRFLRVGLAVPILSTVAALRKMVAEEGGVPADEVILVELYPSGFQRSFFDEEDLNTIAEGDNVYAFQVPPSPSQGTLSAHPLGLSASPRLAAREGQRFSLSLHSESKVLILFCNLVGSGQQASRFGPPFLIREDRAVSWAQLQQSILSKVRHLMKSEAPVQNLGSLFSIRVVGLSVACSYLSPKDSRPLCHWAVDRVLHLRRPGGPPHVKLAVEWDSSVKERLFGSLQEERAQDADSVWQQQQAHQQHSCTLDECFQFYTKEEQLAQDDAWKCPHCQVLQQGMVKLSLWTLPDILIIHLKRFCQVGERRNKLSTLVKFPLSGLNMAPHVAQRSTSPEAGLGPWPSWKQPDCLPTSYPLDFLYDLYAVCNHHGNLQGGHYTAYCRNSLDGQWYSYDDSTVEPLREDEVNTRGAYILFYQKRNSIPPWSASSSMRGSTSSSLSDHWLLRLGSHAGSTRGSLLSWSSAPCPSLPQVPDSPIFTNSLCNQEKGGLEPRRLVRGVKGRSISMKAPTTSRAKQGPFKTMPLRWSFGSKEKPPGASVELVEYLESRRRPRSTSQSIVSLLTGTAGEDEKSASPRSNVALPANSEDGGRAIERGPAGVPCPSAQPNHCLAPGNSDGPNTARKLKENAGQDIKLPRKFDLPLTVMPSVEHEKPARPEGQKAMNWKESFQMGSKSSPPSPYMGFSGNSKDSRRGTSELDRPLQGTLTLLRSVFRKKENRRNERAEVSPQVPPVSLVSGGLSPAMDGQAPGSPPALRIPEGLARGLGSRLERDVWSAPSSLRLPRKASRAPRGSALGMSQRTVPGEQASYGTFQRVKYHTLSLGRKKTLPESSF

SEQ ID NO: 14 - protein, 605 aa, Homo sapiens
MSQLSSTLKRYTESARYTDAHYAKSGYGAYTPSSYGANLAASLLEKEKLGFKPVPTSSFLTRPRTYGPSSLLDYDRGRPLLRPDITGGGKRAESQTRGTERPLGSGLSGGSGFPYGVTNNCLSYLPINAYDQGVTLTQKLDSQSDLARDFSSLRTSDSYRIDPRNLGRSPMLARTRKELCTLQGLYQTASCPEYLVDYLENYGRKGSASQVPSQAPPSRVPEIISPTYRPIGRYTLWETGKGQAPGPSRSSSPGRDGMNSKSAQGLAGLRNLGNTCFMNSILQCLSNTRELRDYCLQRLYMRDLHHGSNAHTALVEEFAKLIQTIWTSSPNDVVSPSEFKTQIQRYAPRFVGYNQQDAQEFLRFLLDGLHNEVNRVTLRPKSNPENLDHLPDDEKGRQMWRKYLEREDSRIGDLFVGQLKSSLTCTDCGYCSTVFDPFWDLSLPIAKRGYPEVTLMDCMRLFTKEDVLDGDEKPTCCRCRGRKRCIKKFSIQRFPKILVLHLKRFSESRIRTSKLTTFVNFPLRDLDLREFASENTNHAVYNLYAVSNHSGTTMGGHYTAYCRSPGTGEWHTFNDSSVTPMSSSQVRTSDAYLLFYELASPPSRM

SEQ ID NO: 15 - protein, 814 aa, Homo sapiens
MRVKDPTKALPEKAKRSKRPTVPHDEDSSDDIAVGLTCQHVSHAISVNHVKRAIAENLWSVCSECLKERRFYDGQLVLTSDIWLCLKCGFQGCGKNSESQHSLKHFKSSRTEPHCIIINLSTWIIWCYECDEKLSTHCNKKVLAQIVDFLQKHASKTQTSAFSRIMKLCEEKCETDEIQKGGKCRNLSVRGITNLGNTCFFNAVMQNLAQTYTLTDLMNEIKESSTKLKIFPSSDSQLDPLVVELSRPGPLTSALFLFLHSMKETEKGPLSPKVLFNQLCQKAPRFKDFQQQDSQELLHYLLDAVRTEETKRIQASILKAFNNPTTKTADDETRKKVKAYGKEGVKMNFIDRIFIGELTSTVMCEECANISTVKDPFIDISLPIIEERVSKPLLWGRMNKYRSLRETDHDRYSGNVTIENIHQPRAAKKHSSSKDKSQLIHDRKCIRKLSSGETVTYQKNENLEMNGDSLMFASLMNSESRLNESPTDDSEKEASHSESNVDADSEPSESESASKQTGLFRSSSGSGVQPDGPLYPLSAGKLLYTKETDSGDKEMAEAISELRLSSTVTGDQDFDRENQPLNISNNLCFLEGKHLRSYSPQNAFQTLSQSYITTSKECSIQSCLYQFTSMELLMGNNKLLCENCTKNKQKYQEETSFAEKKVEGVYTNARKQLLISAVPAVLILHLKRFHQAGLSLRKVNRHVDFPLMLDLAPFCSATCKNASVGDKVLYGLYGIVEHSGSMREGHYTAYVKVRTPSRKLSEHNTKKKNVPGLKAADNESAGQWVHVSDTYLQVVPESRALSAQAYLLFYERVL

SEQ ID NO: 16 - protein, 1604 aa, Homo sapiens
MGAKESRIGFLSYEEALRRVTDVELKRLKDAFKRTCGLSYYMGQHCFIREVLGDGVPPKVAEVIYCSFGGTSKGLHFNNLIVGLVLLTRGKDEEKAKYIFSLFSSESGNYVIREEMERMLHVVDGKVPDTLRKCFSEGEKVNYEKFRNWLFLNKDAFTFSRWLLSGGVYVTLTDDSDTPTFYQTLAGVTHLEESDIIDLEKRYWLLKAQSRTGRFDLETFGPLVSPPIRPSLSEGLFNAFDENRDNHIDFKEISCGLSACCRGPLAERQKFCFKVFDVDRDGVLSRVELRDMVVALLEVWKDNRTDDIPELHMDLSDIVEGILNAHDTTKMGHLTLEDYQIWSVKNVLANEFLNLLFQVCHIVLGLRPATPEEEGQIIRGWLERESRYGLQAGHNWFIISMQWWQQWKEYVKYDANPVVIEPSSVLNGGKYSFGTAAHPMEQVEDRIGSSLSYVNTTEEKFSDNISTASEASETAGSGFLYSATPGADVCFARQHNTSDNNNQCLLGANGNILLHLNPQKPGAIDNQPLVTQEPVKATSLTLEGGRLKRTPQLIHGRDYEMVPEPVWRALYHWYGANLALPRPVIKNSKTDIPELELFPRYLLFLRQQPATRTQQSNIWVNMGNVPSPNAPLKRVLAYTGCFSRMQTIKEIHEYLSQRLRIKEEDMRLWLYNSENYLTLLDDEDHKLEYLKIQDEQHLVIEVRNKDMSWPEEMSFIANSSKIDRHKVPTEKGATGLSNLGNTCFMNSSIQCVSNTQPLTQYFISGRHLYELNRTNPIGMKGHMAKCYGDLVQELWSGTQKNVAPLKLRWTIAKYAPRFNGFQQQDSQELLAFLLDGLHEDLNRVHEKPYVELKDSDGRPDWEVAAEAWDNHLRRNRSIVVDLFHGQLRSQVKCKTCGHISVRFDPFNFLSLPLPMDSYMHLEITVIKLDGTTPVRYGLRLNMDEKYTGLKKQLSDLCGLNSEQILLAEVHGSNIKNFPQDNQKVRLSVSGFLCAFEIPVPVSPISASSPTQTDFSSSPSTNEMFTLTTNGDLPRPIFIPNGMPNTVVPCGTEKNFTNGMVNGHMPSLPDSPFTGYIIAVHRKMMRTELYFLSSQKNRPSLFGMPLIVPCTVHTRKKDLYDAVWIQVSRLASPLPPQEASNHAQDCDDSMGYQYPFTLRVVQKDGNSCAWCPWYRFCRGCKIDCGEDRAFIGNAYIAVDWDPTALHLRYQTSQERVVDEHESVEQSRRAQAEPINLDSCLRAFTSEEELGENEMYYCSKCKTHCLATKKLDLWRLPPILIIHLKRFQFVNGRWIKSQKIVKFPRESFDPSAFLVPRDPALCQHKPLTPQGDELSEPRILAREVKKVDAQSSAGEEDVLLSKSPSSLSANIISSPKGSPSSSRKSGTSCPSSKNSSPNSSPRTLGRSKGRLRLPQIGSKNKLSSSKENLDASKENGAGQICELADALSRGHVLGGSQPELVTPQDHEVALANGFLYEHEACGNGYSNGQLGNHSEEDSTDDQREDTRIKPIYNLYAISCHSGILGGGHYVTYAKNPNCKWYCYNDSSCKELHPDEIDTDSAYILFYEQQGIDYAQFLPKTDGKKMADTSSMDEDFESDYKKYCVLQ

SEQ ID NO: 17 - protein, 398 aa, Homo sapiens
MEDDSLYLRGEWQFNHFSKLTSSRPDAAFAEIQRTSLPEKSPLSCETRVDLCDDLAPVARQLAPREKLPLSSRRPAAVGAGLQNMGNTCYVNASLQCLTYTPPLANYMLSREHSQTCHRHKGCMLCTMQAHITRALHNPGHVIQPSQALAAGFHRGKQEDAHEFLMFTVDAMKKACLPGHKQVDHHSKDTTLIHQIFGGYWRSQIKCLHCHGISDTFDPYLDIALDIQAAQSVQQALEQLVKPEELNGENAYHCGVCLQRAPASKTLTLHTSAKVLILVLKRFSDVTGNKIAKNVQYPECLDMQPYMSQQNTGPLVYVLYAVLVHAGWSCHNGHYFSYVKAQEGQWYKMDDAEVTASSITSVLSQQAYVLFYIQKSEWERHSESVSRGREPRALGSED

SEQ ID NO: 18 - protein, 1324 aa, Homo sapiens
MTIVDKASESSDPSAYQNQPGSSEAVSPGDMDAGSASWGAVSSLNDVSNHTLSLGPVPGAVVYSSSSVPDKSKPSPQKDQALGDGIAPPQKVLFPSEKICLKWQQTHRVGAGLQNLGNTCFANAALQCLTYTPPLANYMLSHEHSKTCHAEGFCMMCTMQAHITQALSNPGDVIKPMFVINEMRRIARHFRFGNQEDAHEFLQYTVDAMQKACLNGSNKLDRHTQATTLVCQIFGGYLRSRVKCLNCKGVSDTFDPYLDITLEIKAAQSVNKALEQFVKPEQLDGENSYKCSKCKKMVPASKRFTIHRSSNVLTLSLKRFANFTGGKIAKDVKYPEYLDIRPYMSQPNGEPIVYVLYAVLVHTGFNCHAGHYFCYIKASNGLWYQMNDSIVSTSDIRSVLSQQAYVLFYIRSHDVKNGGELTHPTHSPGQSSPRPVISQRVVTNKQAAPGFIGPQLPSHMIKNPPHLNGTGPLKDTPSSSMSSPNGNSSVNRASPVNASASVQNWSVNRSSVIPEHPKKQKITISIHNKLPVRQCQSQPNLHSNSLENPTKPVPSSTITNSAVQSTSNASTMSVSSKVTKPIPRSESCSQPVMNGKSKLNSSVLVPYGAESSEDSDEESKGLGKENGIGTIVSSHSPGQDAEDEEATPHELQEPMTLNGANSADSDSDPKENGLAPDGASCQGQPALHSENPFAKANGLPGKLMPAPLLSLPEDKILETFRLSNKLKGSTDEMSAPGAERGPPEDRDAEPQPGSPAAESLEEPDAAAGLSSTKKAPPPRDPGTPATKEGAWEAMAVAPEEPPPSAGEDIVGDTAPPDLCDPGSLTGDASPLSQDAKGMIAEGPRDSALAEAPEGLSPAPPARSEEPCEQPLLVHPSGDHARDAQDPSQSLGAPEAAERPPAPVLDMAPAGHPEGDAEPSPGERVEDAAAPKAPGPSPAKEKIGSLRKVDRGHYRSRRERSSSGEPARESRSKTEGHRHRRRRTCPRERDRQDRHAPEHHPGHGDRLSPGERRSLGRCSHHHSRHRSGVELDWVRHHYTEGERGWGREKFYPDRPRWDRCRYYHDRYALYAARDWKPFHGGREHERAGLHERPHKDHNRGRRGCEPARERERHRPSSPRAGAPHALAPHPDRFSHDRTALVAGDNCNLSDRFHEHENGKSRKRRHDSVENSDSHVEKKARRSEQKDPLEEPKAKKHKKSKKKKKSKDKHRDRDSRHQQDSDLSAACSDADLHRHKKKKKKKKRHSRKSEDFVKDSELHLPRVTSLETVAQFRRAQGGFPLSGGPPLEGVGPFREKTKHLRMESRDDRCRLFEYGQGKRRYLELGR

SEQ ID NO: 19 - protein, 530 aa, Homo sapiens
MEDDSLYLGGDWQFNHFSKLTSSRLDAAFAEIQRTSLSEKSPLSSETRFDLCDDLAPVARQLAPREKLPLSSRRPAAVGAGLQKIGNTFYVNVSLQCLTYTLPLSNYMLSREDSQTCHLHKCCMFCTMQAHITWALHSPGHVIQPSQVLAAGFHRGEQEDAHEFLMFTVDAMKKACLPGHKQLDHHSKDTTLIHQIFGAYWRSQIKYLHCHGVSDTFDPYLDIALDIQAAQSVKQALEQLVKPKELNGENAYHCGLCLQKAPASKTLTLPTSAKVLILVLKRFSDVTGNKLAKNVQYPKCRDMQPYMSQQNTGPLVYVLYAVLVHAGWSCHNGHYFSYVKAQEGQWYKMDDAEVTASGITSVLSQQAYVLFYIQKSEWERHSESVSRGREPRALGAEDTDRPATQGELKRDHPCLQVPELDEHLVERATQESTLDHWKFPQEQNKTKPEFNVRKVEGTLPPNVLVIHQSKYKCGMKNHHPEQQSSLLNLSSTKPTDQESMNTGTLASLQGSTRRSKGNNKHSKRSLLVCQ

SEQ ID NO: 20 - protein, 530 aa, Homo sapiens
MEDDSLYLGGEWQFNHFSKLTSSRPDAAFAEIQRTSLPEKSPLSCETRVDLCDDLAPVARQLAPREKLPLSSRRPAAVGAGLQNMGNTCYVNASLQCLTYTPPLANYMLSREHSQTCHRHKGCMLCTMQAHITRALHNPGHVIQPSQALAAGFHRGKQEDAHEFLMFTVDAMKKACLPGHKQVDHHSKDTTLIHQIFGGYWRSQIKCLHCHGISDTFDPYLDIALDIQAAQSVQQALEQLVKPEELNGENAYHCGVCLQRAPASKTLTLHTSAKVLILVLKRFSDVTGNKIAKNVQYPECLDMQPYMSQQNTGPLVYVLYAVLVHAGWSCHNGHYFSYVKAQEGQWYKMDDAEVTAASITSVLSQQAYVLFYIQKSEWERHSESVSRGREPRALGAEDTDRRATQGELKRDHPCLQAPELDEHLVERATQESTLDHWKFLQEQNKTKPEFNVRKVEGTLPPDVLVIHQSKYKCGMKNHHPEQQSSLLNLSSSTPTHQESMNTGTLASLRGRARRSKGKNKHSKRALLVCQ

SEQ ID NO: 21 - protein, 863 aa, Homo sapiens
MQRRGALFGMPGGSGGRKMAAGDIGELLVPHMPTIRVPRSGDRVYKNECAFSYDSPNSEGGLYVCMNTFLAFGREHVERHFRKTGQSVYMHLKRHVREKVRGASGGALPKRRNSKIFLDLDTDDDLNSDDYEYEDEAKLVIFPDHYEIALPNIEELPALVTIACDAVLSSKSPYRKQDPDTWENELPVSKYANNLTQLDNGVRIPPSGWKCARCDLRENLWLNLTDGSVLCGKWFFDSSGGNGHALEHYRDMGYPLAVKLGTITPDGADVYSFQEEEPVLDPHLAKHLAHFGIDMLHMHGTENGLQDNDIKLRVSEWEVIQESGTKLKPMYGPGYTGLKNLGNSCYLSSVMQAIFSIPEFQRAYVGNLPRIFDYSPLDPTQDFNTQMTKLGHGLLSGQYSKPPVKSELIEQVMKEEHKPQQNGISPRMFKAFVSKSHPEFSSNRQQDAQEFFLHLVNLVERNRIGSENPSDVFRFLVEERIQCCQTRKVRYTERVDYLMQLPVAMEAATNKDELIAYELTRREAEANRRPLPELVRAKIPFSACLQAFSEPENVDDFWSSALQAKSAGVKTSRFASFPEYLVVQIKKFTFGLDWVPKKFDVSIDMPDLLDINHLRARGLQPGEEELPDISPPIVIPDDSKDRLMNQLIDPSDIDESSVMQLAEMGFPLEACRKAVYFTGNMGAEVAFNWIIVHMEEPDFAEPLTMPGYGGAASAGASVFGASGLDNQPPEEIVAIITSMGFQRNQAIQALRATNNNLERALDWIFSHPEFEEDSDFVIEMENNANANIISEAKPEGPRVKDGSGTYELFAFISHMGTSTMSGHYICHIKKEGRWVIYNDHKVCASERPPKDLGYMYFYRRIPS

SEQ ID NO: 22 - protein, 963 aa, Homo sapiens
MAVAPRLFGGLCFRFRDQNPEVAVEGRLPISHSCVGCRRERTAMATVAANPAAAAAAVAAAAAVTEDREPQHEELPGLDSQWRQIENGESGRERPLRAGESWFLVEKHWYKQWEAYVQGGDQDSSTFPGCINNATLFQDEINWRLKEGLVEGEDYVLLPAAAWHYLVSWYGLEHGQPPIERKVIELPNIQKVEVYPVELLLVRHNDLGKSHTVQFSHTDSIGLVLRTARERFLVEPQEDTRLWAKNSEGSLDRLYDTHITVLDAALETGQLIIMETRKKDGTWPSAQLHVMNNNMSEEDEDFKGQPGICGLTNLGNTCFMNSALQCLSNVPQLTEYFLNNCYLEELNFRNPLGMKGEIAEAYADLVKQAWSGHHRSIVPHVFKNKVGHFASQFLGYQQHDSQELLSFLLDGLHEDLNRVKKKEYVELCDAAGRPDQEVAQEAWQNHKRRNDSVIVDTFHGLFKSTLVCPDCGNVSVTFDPFCYLSVPLPISHKRVLEVFFIPMDPRRKPEQHRLVVPKKGKISDLCVALSKHTGISPERMMVADVFSHRFYKLYQLEEPLSSILDRDDIFVYEVSGRIEAIEGSREDIVVPVYLRERTPARDYNNSYYGLMLFGHPLLVSVPRDRFTWEGLYNVLMYRLSRYVTKPNSDDEDDGDEKEDDEEDKDDVPGPSTGGSLRDPEPEQAGPSSGVTNRCPFLLDNCLGTSQWPPRRRRKQLFTLQTVNSNGTSDRTTSPEEVHAQPYIAIDWEPEMKKRYYDEVEAEGYVKHDCVGYVMKKAPVRLQECIELFTTVETLEKENPWYCPSCKQHQLATKKLDLWMLPEILIIHLKRFSYTKFSREKLDTLVEFPIRDLDFSEFVIQPQNESNPELYKYDLIAVSNHYGGMRDGHYTTFACNKDSGQWHYFDDNSVSPVNENQIESKAAYVLFYQRQDVARRLLSPAGSSGAPASPACSSPPSSEFMDVN

SEQ ID NO: 23 - protein, 530 aa, Homo sapiens
MGDDSLYLGGEWQFNHFSKLTSSRPDAAFAEIQRTSLPEKSPLSSETRVDLCDDLAPVARQLAPREKLPLSSRRPAAVGAGLQNMGNTCYENASLQCLTYTLPLANYMLSREHSQTCQRPKCCMLCTMQAHITWALHSPGHVIQPSQALAAGFHRGKQEDVHEFLMFTVDAMKKACLPGHKQVDHHCKDTTLIHQIFGGCWRSQIKCLHCHGISDTFDPYLDIALDIQAAQSVKQALEQLVKPEELNGENAYHCGLCLQRAPASNTLTLHTSAKVLILVLKRFSDVAGNKLAKNVQYPECLDMQPYMSQQNTGPLVYVLYAVLVHAGWSCHDGHYFSYVKAQEVQWYKMDDAEVTVCSIISVLSQQAYVLFYIQKSEWERHSESVSRGREPRALGAEDTDRRAKQGELKRDHPCLQAPELDEHLVERATQESTLDHWKFLQEQNKTKPEFNVGKVEGTLPPNALVIHQSKYKCGMKNHHPEQQSSLLNLSSTTRTDQESMNTGTLASLQGRTRRAKGKNKHSKRALLVCQ

SEQ ID NO: 24 - protein, 494 aa, Homo sapiens
MPLYSVTVKWGKEKFEGVELNTDEPPMVFKAQLFALTGVQPARQKVMVKGGTLKDDDWGNIKIKNGMTLLMMGSADALPEEPSAKTVFVEDMTEEQLASAMELPCGLTNLGNTCYMNATVQCIRSVPELKDALKRYAGALRASGEMASAQYITAALRDLFDSMDKTSSSIPPIILLQFLHMAFPQFAEKGEQGQYLQQDANECWIQMMRVLQQKLEAIEDDSVKETDSSSASAATPSKKKSLIDQFFGVEFETTMKCTESEEEEVTKGKENQLQLSCFINQEVKYLFTGLKLRLQEEITKQSPTLQRNALYIKSSKISRLPAYLTIQMVRFFYKEKESVNAKVLKDVKFPLMLDMYELCTPELQEKMVSFRSKFKDLEDKKVNQQPNTSDKKSSPQKEVKYEPFSFADDIGSNNCGYYDLQAVLTHQGRSSSSGHYVSWVKRKQDEWIKFDDDKVSIVTPEDILRLSGGGDWHIAYVLLYGPRRVEIMEEESEQ

SEQ ID NO: 25 - protein, 963 aa, Homo sapiens
MAEGGGCRERPDAETQKSELGPLMRTTLQRGAQWYLIDSRWFKQWKKYVGFDSWDMYNVGEHNLFPGPIDNSGLFSDPESQTLKEHLIDELDYVLVPTEAWNKLLNWYGCVEGQQPIVRKVVEHGLFVKHCKVEVYLLELKLCENSDPTNVLSCHFSKADTIATIEKEMRKLFNIPAERETRLWNKYMSNTYEQLSKLDNTVQDAGLYQGQVLVIEPQNEDGTWPRQTLQSKSSTAPSRNFTTSPKSSASPYSSVSASLIANGDSTSTCGMHSSGVSRGGSGFSASYNCQEPPSSHIQPGLCGLGNLGNTCFMNSALQCLSNTAPLTDYFLKDEYEAEINRDNPLGMKGEIAEAYAELIKQMWSGRDAHVAPRMFKTQVGRFAPQFSGYQQQDSQELLAFLLDGLHEDLNRVKKKPYLELKDANGRPDAVVAKEAWENHRLRNDSVIVDTFHGLFKSTLVCPECAKVSVTFDPFCYLTLPLPLKKDRVMEVFLVPADPHCRPTQYRVTVPLMGAVSDLCEALSRLSGIAAENMVVADVYNHRFHKIFQMDEGLNHIMPRDDIFVYEVCSTSVDGSECVTLPVYFRERKSRPSSTSSASALYGQPLLLSVPKHKLTLESLYQAVCDRISRYVKQPLPDEFGSSPLEPGACNGSRNSCEGEDEEEMEHQEEGKEQLSETEGSGEDEPGNDPSETTQKKIKGQPCPKRLFTFSLVNSYGTADINSLAADGKLLKLNSRSTLAMDWDSETRRLYYDEQESEAYEKHVSMLQPQKKKKTTVALRDCIELFTTMETLGEHDPWYCPNCKKHQQATKKFDLWSLPKILVVHLKRFSYNRYWRDKLDTVVEFPIRGLNMSEFVCNLSARPYVYDLIAVSNHYGAMGVGHYTAYAKNKLNGKWYYFDDSNVSLASEDQIVTKAAYVLFYQRRDDEFYKTPSLSSSGSSDGGTRPSSSQQGFGDDEACSMDTN

SEQ ID NO: 26 - protein, 913 aa, Homo sapiens
MAALFLRGFVQIGNCKTGISKSKEAFIEAVERKKKDRLVLYFKSGKYSTFRLSDNIQNVVLKSYRGNQNHLHLTLQNNNGLFIEGLSSTDAEQLKIFLDRVHQNEVQPPVRPGKGGSVFSSTTQKEINKTSFHKVDEKSSSKSFEIAKGSGTGVLQRMPLLTSKLTLTCGELSENQHKKRKRMLSSSSEMNEEFLKENNSVEYKKSKADCSRCVSYNREKQLKLKELEENKKLECESSCIMNATGNPYLDDIGLLQALTEKMVLVFLLQQGYSDGYTKWDKLKLFFELFPEKICHGLPNLGNTCYMNAVLQSLLSIPSFADDLLNQSFPWGKIPLNALTMCLARLLFFKDTYNIEIKEMLLLNLKKAISAAAEIFHGNAQNDAHEFLAHCLDQLKDNMEKLNTIWKPKSEFGEDNFPKQVFADDPDTSGFSCPVITNFELELLHSIACKACGQVILKTELNNYLSINLPQRIKAHPSSIQSTFDLFFGAEELEYKCAKCEHKTSVGVHSFSRLPRILIVHLKRYSLNEFCALKKNDQEVIISKYLKVSSHCNEGTRPPLPLSEDGEITDFQLLKVIRKMTSGNISVSWPATKESKDILAPHIGSDKESEQKKGQTVFKGASRRQQQKYLGKNSKPNELESVYSGDRAFIEKEPLAHLMTYLEDTSLCQFHKAGGKPASSPGTPLSKVDFQTVPENPKRKKYVKTSKFVAFDRIINPTKDLYEDKNIRIPERFQKVSEQTQQCDGMRICEQAPQQALPQSFPKPGTQGHTKNLLRPTKLNLQKSNRNSLLALGSNKNPRNKDILDKIKSKAKETKRNDDKGDHTYRLISVVSHLGKTLKSGHYICDAYDFEKQIWFTYDDMRVLGIQEAQMQEDRRCTGYIFFYMHNEIFEEMLKREENAQLNSKEVEETLQKE

SEQ ID NO: 27 - protein, 1318 aa, Homo sapiens
MSGGASATGPRRGPPGLEDTTSKKKQKDRANQESKDGDPRKETGSRYVAQAGLEPLASGDPSASASHAAGITGSRHRTRLFFPSSSGSASTPQEEQTKEGACEDPHDLLATPTPELLLDWRQSAEEVIVKLRVGVGPLQLEDVDAAFTDTDCVVRFAGGQQWGGVFYAEIKSSCAKVQTRKGSLLHLTLPKKVPMLTWPSLLVEADEQLCIPPLNSQTCLLGSEENLAPLAGEKAVPPGNDPVSPAMVRSRNPGKDDCAKEEMAVAADAATLVDEPESMVNLAFVKNDSYEKGPDSVVVHVYVKEICRDTSRVLFREQDFTLIFQTRDGNFLRLHPGCGPHTTFRWQVKLRNLIEPEQCTFCFTASRIDICLRKRQSQRWGGLEAPAARVGGAKVAVPTGPTPLDSTPPGGAPHPLTGQEEARAVEKDKSKARSEDTGLDSVATRTPMEHVTPKPETHLASPKPTCMVPPMPHSPVSGDSVEEEEEEEKKVCLPGFTGLVNLGNTCFMNSVIQSLSNTRELRDFFHDRSFEAEINYNNPLGTGGRLAIGFAVLLRALWKGTHHAFQPSKLKAIVASKASQFTGYAQHDAQEFMAFLLDGLHEDLNRIQNKPYTETVDSDGRPDEVVAEEAWQRHKMRNDSFIVDLFQGQYKSKLVCPVCAKVSITFDPFLYLPVPLPQKQKVLPVFYFAREPHSKPIKFLVSVSKENSTASEVLDSLSQSVHVKPENLRLAEVIKNRFHRVFLPSHSLDTVSPSDTLLCFELLSSELAKERVVVLEVQQRPQVPSVPISKCAACQRKQQSEDEKLKRCTRCYRVGYCNQLCQKTHWPDHKGLCRPENIGYPFLVSVPASRLTYARLAQLLEGYARYSVSVFQPPFQPGRMALESQSPGCTTLLSTGSLEAGDSERDPIQPPELQLVTPMAEGDTGLPRVWAAPDRGPVPSTSGISSEMLASGPIEVGSLPAGERVSRPEAAVPGYQHPSEAMNAHTPQFFIYKIDSSNREQRLEDKGDTPLELGDDCSLALVWRNNERLQEFVLVASKELECAEDPGSAGEAARAGHFTLDQCLNLFTRPEVLAPEEAWYCPQCKQHREASKQLLLWRLPNVLIVQLKRFSFRSFIWRDKINDLVEFPVRNLDLSKFCIGQKEEQLPSYDLYAVINHYGGMIGGHYTACARLPNDRSSQRSDVGWRLFDDSTVTTVDESQVVTRYAYVLFYRRRNSPVERPPRAGHSEHHPDLGPAAEAAASQASRIWQELEAEEEPVPEGSGPLGPWGPQDWVGPLPRGPTTPDEGCLRYFVLGTVAALVALVLNVFYPLVSQSRWR

SEQ ID NO: 28 - protein, 798 aa, Homo sapiens
MALHSPQYIFGDFSPDEFNQFFVTPRSSVELPPYSGTVLCGTQAVDKLPDGQEYQRIEFGVDEVIEPSDTLPRTPSYSISSTLNPQAPEFILGCTASKITPDGITKEASYGSIDCQYPGSALALDGSSNVEAEVLENDGVSGGLGQRERKKKKKRPPGYYSYLKDGGDDSISTEALVNGHANSAVPNSVSAEDAEFMGDMPPSVTPRTCNSPQNSTDSVSDIVPDSPFPGALGSDTRTAGQPEGGPGADFGQSCFPAEAGRDTLSRTAGAQPCVGTDTTENLGVANGQILESSGEGTATNGVELHTTESIDLDPTKPESASPPADGTGSASGTLPVSQPKSWASLFHDSKPSSSSPVAYVETKYSPPAISPLVSEKQVEVKEGLVPVSEDPVAIKIAELLENVTLIHKPVSLQPRGLINKGNWCYINATLQALVACPPMYHLMKFIPLYSKVQRPCTSTPMIDSFVRLMNEFTNMPVPPKPRQALGDKIVRDIRPGAAFEPTYIYRLLTVNKSSLSEKGRQEDAEEYLGFILNGLHEEMLNLKKLLSPSNEKLTISNGPKNHSVNEEEQEEQGEGSEDEWEQVGPRNKTSVTRQADFVQTPITGIFGGHIRSVVYQQSSKESATLQPFFTLQLDIQSDKIRTVQDALESLVARESVQGYTTKTKQEVEISRRVTLEKLPPVLVLHLKRFVYEKTGGCQKLIKNIEYPVDLEISKELLSPGVKNKNFKCHRTYRLFAVVYHHGNSATGGHYTTDVFQIGLNGWLRIDDQTVKVINQYQVVKPTAERTAYLLYYRRVDLL

SEQ ID NO: 29 - protein, 688 aa, Homo sapiens
MDRCKHVGRLRLAQDHSILNPQKWCCLECATTESVWACLKCSHVACGRYIEDHALKHFEETGHPLAMEVRDLYVFCYLCKDYVLNDNPEGDLKLLRSSLLAVRGQKQDTPVRRGRTLRSMASGEDVVLPQRAPQGQPQMLTALWYRRQRLLARTLRLWFEKSSRGQAKLEQRRQEEALERKKEEARRRRREVKRRLLEELASTPPRKSARLLLHTPRDAGPAASRPAALPTSRRVPAATLKLRRQPAMAPGVTGLRNLGNTCYMNSILQVLSHLQKFRECFLNLDPSKTEHLFPKATNGKTQLSGKPTNSSATELSLRNDRAEACEREGFCWNGRASISRSLELIQNKEPSSKHISLCRELHTLFRVMWSGKWALVSPFAMLHSVWSLIPAFRGYDQQDAQEFLCELLHKVQQELESEGTTRRILIPFSQRKLTKQVLKVVNTIFHGQLLSQVTCISCNYKSNTIEPFWDLSLEFPERYHCIEKGFVPLNQTECLLTEMLAKFTETEALEGRIYACDQCNSKRRKSNPKPLVLSEARKQLMIYRLPQVLRLHLKRFRWSGRNHREKIGVHVVFDQVLTMEPYCCRDMLSSLDKETFAYDLSAVVMHHGKGFGSGHYTAYCYNTEGGFWVHCNDSKLNVCSVEEVCKTQAYILFYTQRTVQGNARISETHLQAQVQSSNNDEGRPQTFS

SEQ ID NO: 30 - protein, 530 aa, Homo sapiens
MEDDSLYLGGEWQFNHFSKLTSPRPDAAFAEIQRTSLPEKSPLSSETRVDLCDDLAPVARQLAPREKLPLSSRRPAAVGAGLQNMGNTCYLNASLQCLTYTPPLANYMLSREHSQTCQRPKCCMLCTMQAHITWALHSPGHVIQPSQALAAGFHRGKQEDAHEFLMFTVDAMKKACLPGHKQVDHHSKDTTLIHQIFGGCWRSQIKCLHCHGISDTFDPYLDIALDIQAAQSVKQALEQLVKPEELNGENAYPCGLCLQRAPASNTLTLHTSAKVLILVLKRFCDVTGNKLAKNVQYPECLDMQPYMSQQNTGPLVYVLYAVLVHAGWSCHNGYYFSYVKAQEGQWYKMDDAEVTACSITSVLSQQAYVLFYIQKSEWERHSESVSRGREPRALGAEDTDRPATQGELKRDHPCLQVPELDEHLVERATEESTLDHWKFPQEQNKMKPEFNVRKVEGTLPPNVLVIHQSKYKCGMKNHHPEQQSSLLNLSSMNSTDQESMNTGTLASLQGRTRRSKGKNKHSKRSLLVCQ

SEQ ID NO: 31 - protein, 350 aa, Homo sapiens
GSKKHTGYVGLKNQGATCYMNSLLQTLFFTNQLRKAVYMMPTEGDDSSKSVPLALQRVFYELQHSDKPVGTKKLTKSFGWETLDSFMQHDVQELCRVLLDNVENKMKGTCVEGTIPKLFRGKMVSYIQCKEVDYRSDRREDYYDIQLSIKGKKNIFESFVDYVAVEQLDGDNKYDAGEHGLQEAEKGVKFLTLPPVLHLQLMRFMYDPQTDQNIKINDRFEFPEQLPLDEFLQKTDPKDPANYILHAVLVHSGDNHGGHYVVYLNPKGDGKWCKFDDDVVSRCTKEEAIEHNYGGHDDDLSVRHCTNAYMLVYIRESKLSEVLQAVTDHDIPQQLVERLQEEKRIEAQKR

SEQ ID NO: 32 - protein, 343 aa, Homo sapiens
AQGLAGLRNLGNTCFMNSILQCLSNTRELRDYCLQRLYMRDLHHGSNAHTALVEEFAKLIQTIWTSSPNDVVSPSEFKTQIQRYAPRFVGYNQQDAQEFLRFLLDGLHNEVNRVTLRPKSNPENLDHLPDDEKGRQMWRKYLEREDSRIGDLFVGQLKSSLTCTDCGYCSTVFDPFWDLSLPIAKRGYPEVTLMDCMRLFTKEDVLDGDEKPTCCRCRGRKRCIKKFSIQRFPKILVLHLKRFSESRIRTSKLTTFVNFPLRDLDLREFASENTNHAVYNLYAVSNHSGTTMGGHYTAYCRSPGTGEWHTFNDSSVTPMSSSQVRTSDAYLLFYELASPPSRM

SEQ ID NO: 33 - protein, 374 aa, Homo sapiens
GLEIMIGKKKGIQGHYNSCYLDSTLFCLFAFSSVLDTVLLRPKEKNDVEYYSETQELLRTEIVNPLRIYGYVCATKIMKLRKILEKVEAASGFTSEEKDPEEFLNILFHHILRVEPLLKIRSAGQKVQDCYFYQIFMEKNEKVGVPTIQQLLEWSFINSNLKFAEAPSCLIIQMPRFGKDFKLFKKIFPSLELNITDLLEDTPRQCRICGGLAMYECRECYDDPDISAGKIKQFCKTCNTQVHLHPKRLNHKYNPVSLPKDLPDWDWRHGCIPCQNMELFAVLCIETSHYVAFVKYGKDDSAWLFFDSMADRDGGQNGFNIPQVTPCPEVGEYLKMSLEDLHSLDSRRIQGCARRLLCDAYMCMYQSPTMSLYK

SEQ ID NO: 34 - protein, 530 aa, Homo sapiens
MEDDSLYLGGEWQFNHFSKLTSSRPDAAFAEIQRTSLPEKSPLSCETRVDLCDDLAPVARQLAPREKLPLSSRRPAAVGAGLQNMGNTCYVNASLQCLTYTPPLANYMLSREHSQTCHRHKGCMLCTMQAHITRALHNPGHVIQPSQALAAGFHRGKQEDAHEFLMFTVDAMKKACLPGHKQVDHHSKDTTLIHQIFGGYWRSQIKCLHCHGISDTFDPYLDIALDIQAAQSVQQALEQLVKPEELNGENAYHCGVCLQRAPASKTLTLHTSAKVLILVLKRFSDVTGNKIAKNVQYPECLDMQPYMSQTNTGPLVYVLYAVLVHAGWSCHNGHYFSYVKAQEGQWYKMDDAEVTASSITSVLSQQAYVLFYIQKSEWERHSESVSRGREPRALGAEDTDRRAKQGELKRDHPCLQAPELDEHLVERATQESTLDHWKFLQEQNKTKPEFNVRKVEGTLPPDVLVIHQSKYKCGMKNHHPEQQSSLLNLSSTTPTHQESMNTGTLASLRGRARRSKGKNKHSKRALLVCQ

SEQ ID NO: 35 - protein, 525 aa, Homo sapiens
MVSRPEPEGEAMDAELAVAPPGCSHLGSFKVDNWKQNLRAIYQCFVWSGTAEARKRKAKSCICHVCGVHLNRLHSCLYCVFFGCFTKKHIHEHAKAKRHNLAIDLMYGGIYCFLCQDYIYDKDMEIIAKEEQRKAWKMQGVGEKFSTWEPTKRELELLKHNPKRRKITSNCTIGLRGLINLGNTCFMNCIVQALTHTPLLRDFFLSDRHRCEMQSPSSCLVCEMSSLFQEFYSGHRSPHIPYKLLHLVWTHARHLAGYEQQDAHEFLIAALDVLHRHCKGDDNGKKANNPNHCNCIIDQIFTGGLQSDVTCQVCHGVSTTIDPFWDISLDLPGSSTPFWPLSPGSEGNVVNGESHVSGTTTLTDCLRRFTRPEHLGSSAKIKCSGCHSYQESTKQLTMKKLPIVACFHLKRFEHSAKLRRKITTYVSFPLELDMTPFMASSKESRMNGQYQQPTDSLNNDNKYSLFAVVNHQGTLESGHYTSFIRQHKDQWFKCDDAIITKASIKDVLDSEGYLLFYHKQFLEYE

SEQ ID NO: 36 - protein, 372 aa, Homo sapiens
MSKAFGLLRQICQSILAESSQSPADLEEKKEEDSNMKREQPRERPRAWDYPHGLVGLHNIGQTCCLNSLIQVFVMNVDFTRILKRITVPRGADEQRRSVPFQMLLLLEKMQDSRQKAVRPLELAYCLQKCNVPLFVQHDAAQLYLKLWNLIKDQITDVHLVERLQALYTIRVKDSLICVDCAMESSRNSSMLTLPLSLFDVDSKPLKTLEDALHCFFQPRELSSKSKCFCENCGKKTRGKQVLKLTHLPQTLTIHLMRFSIRNSQTRKICHSLYFPQSLDFSQILPMKRESCDAEEQSGGQYELFAVIAHVGMADSGHYCVYIRNAVDGKWFCFNDSNICLVSWEDIQCTYGNPNYHWQETAYLLVYMKMEC

SEQ ID NO: 37 - protein, 1077 aa, Homo sapiens
MTAELQQDDAAGAADGHGSSCQMLLNQLREITGIQDPSFLHEALKASNGDITQAVSLLTDERVKEPSQDTVATEPSEVEGSAANKEVLAKVIDLTHDNKDDLQAAIALSLLESPKIQADGRDLNRMHEATSAETKRSKRKRCEVWGENPNPNDWRRVDGWPVGLKNVGNTCWFSAVIQSLFQLPEFRRLVLSYSLPQNVLENCRSHTEKRNIMFMQELQYLFALMMGSNRKFVDPSAALDLLKGAFRSSEEQQQDVSEFTHKLLDWLEDAFQLAVNVNSPRNKSENPMVQLFYGTFLTEGVREGKPFCNNETFGQYPLQVNGYRNLDECLEGAMVEGDVELLPSDHSVKYGQERWFTKLPPVLTFELSRFEFNQSLGQPEKIHNKLEFPQIIYMDRYMYRSKELIRNKRECIRKLKEEIKILQQKLERYVKYGSGPARFPLPDMLKYVIEFASTKPASESCPPESDTHMTLPLSSVHCSVSDQTSKESTSTESSSQDVESTFSSPEDSLPKSKPLTSSRSSMEMPSQPAPRTVTDEEINFVKTCLQRWRSEIEQDIQDLKTCIASTTQTIEQMYCDPLLRQVPYRLHAVLVHEGQANAGHYWAYIYNQPRQSWLKYNDISVTESSWEEVERDSYGGLRNVSAYCLMYINDKLPYFNAEAAPTESDQMSEVEALSVELKHYIQEDNWRFEQEVEEWEEEQSCKIPQMESSTNSSSQDYSTSQEPSVASSHGVRCLSSEHAVIVKEQTAQAIANTARAYEKSGVEAALSEVMLSPAMQGVILAIAKARQTFDRDGSEAGLIKAFHEEYSRLYQLAKETPTSHSDPRLQHVLVYFFQNEAPKRVVERTLLEQFADKNLSYDERSISIMKVAQAKLKEIGPDDMNMEEYKKWHEDYSLFRKVSVYLLTGLELYQKGKYQEALSYLVYAYQSNAALLMKGPRRGVKESVIALYRRKCLLELNAKAASLFETNDDHSVTEGINVMNELIIPCIHLIINNDISKDDLDAIEVMRNHWCSYLGQDIAENLQLCLGEFLPRLLDPSAEIIVLKEPPTIRPNSPYDLCSRFAAVMESIQGVSTVTVK

SEQ ID NO: 38 - protein, 530 aa, Homo sapiens
MEDDSLYLGGEWQFNHFSKLTSSRPDAAFAEIQRTSLPEKSPLSSEARVDLCDDLAPVARQLAPRKKLPLSSRRPAAVGAGLQNMGNTCYENASLQCLTYTPPLANYMLSREHSQTCQRPKCCMLCTMQAHITWALHSPGHVIQPSQALAAGFHRGKQEDAHEFLMFTVDAMKKACLPGHKQVDHHSKDTTLIHQIFGGCWRSQIKCLHCHGISDTFDPYLDIALDIQAAQSVKQALEQLVKPEELNGENAYHCGLCLQRAPASKTLTLHTSAKVLILVLKRFSDVTGNKLAKNVQYPECLDMQPYMSQQNTGPLVYVLYAVLVHAGWSCHDGHYFSYVKAQEGQWYKMDDAKVTACSITSVLSQQAYVLFYIQKSEWERHSESVSRGREPRALGAEDTDRRATQGELKRDHPCLQAPELDERLVERATQESTLDHWKFPQEQNKTKPEFNVRKVEGTLPPNVLVIHQSKYKCGMKNHHPEQQSSLLNLSSTTRTDQESVNTGTLASLQGRTRRSKGKNKHSKRALLVCQ

SEQ ID NO: 39 - protein, 1352 aa, Homo sapiens
MSKVTAPGSGPPAAASGKEKRSFSKRLFRSGRAGGGGAGGPGASGPAAPSSPSSPSSARSVGSFMSRVLKTLSTLSHLSSEGAAPDRGGLRSCFPPGPAAAPTPPPCPPPPASPAPPACAAEPVPGVAGLRNHGNTCFMNATLQCLSNTELFAEYLALGQYRAGRPEPSPDPEQPAGRGAQGQGEVTEQLAHLVRALWTLEYTPQHSRDFKTIVSKNALQYRGNSQHDAQEFLLWLLDRVHEDLNHSVKQSGQPPLKPPSETDMMPEGPSFPVCSTFVQELFQAQYRSSLTCPHCQKQSNTFDPFLCISLPIPLPHTRPLYVTVVYQGKCSHCMRIGVAVPLSGTVARLREAVSMETKIPTDQIVLTEMYYDGFHRSFCDTDDLETVHESDCIFAFETPEIFRPEGILSQRGIHLNNNLNHLKFGLDYHRLSSPTQTAAKQGKMDSPTSRAGSDKIVLLVCNRACTGQQGKRFGLPFVLHLEKTIAWDLLQKEILEKMKYFLRPTVCIQVCPFSLRVVSVVGITYLLPQEEQPLCHPIVERALKSCGPGGTAHVKLVVEWDKETRDFLFVNTEDEYIPDAESVRLQRERHHQPQTCTLSQCFQLYTKEERLAPDDAWRCPHCKQLQQGSITLSLWTLPDVLIIHLKRFRQEGDRRMKLQNMVKFPLTGLDMTPHVVKRSQSSWSLPSHWSPWRRPYGLGRDPEDYIYDLYAVCNHHGTMQGGHYTAYCKNSVDGLWYCFDDSDVQQLSEDEVCTQTAYILFYQRRTAIPSWSANSSVAGSTSSSLCEHWVSRLPGSKPASVTSAASSRRTSLASLSESVEMTGERSEDDGGFSTRPFVRSVQRQSLSSRSSVTSPLAVNENCMRPSWSLSAKLQMRSNSPSRFSGDSPIHSSASTLEKIGEAADDKVSISCFGSLRNLSSSYQEPSDSHSRREHKAVGRAPLAVMEGVFKDESDTRRLNSSVVDTQSKHSAQGDRLPPLSGPFDNNNQIAYVDQSDSVDSSPVKEVKAPSHPGSLAKKPESTTKRSPSSKGTSEPEKSLRKGRPALASQESSLSSTSPSSPLPVKVSLKPSRSRSKADSSSRGSGRHSSPAPAQPKKESSPKSQDSVSSPSPQKQKSASALTYTASSTSAKKASGPATRSPFPPGKSRTSDHSLSREGSRQSLGSDRASATSTSKPNSPRVSQARAGEGRGAGKHVRSSSMASLRSPSTSIKSGLKRDSKSEDKGLSFFKSALRQKETRRSTDLGKTALLSKKAGGSSVKSVCKNTGDDEAERGHQPPASQQPNANTTGKEQLVTKDPASAKHSLLSARKSKSSQLDSGVPSSPGGRQSAEKSSKKLSSSMQTSARPSQKPQ

SEQ ID NO: 40 - protein, 530 aa, Homo sapiens
MEEDSLYLGGEWQFNHFSKLTSSRPDAAFAEIQRTSLPEKSPLSCETRVDLCDDLAPVARQLAPREKLPLSSRRPAAVGAGLQNMGNTCYVNASLQCLTYTPPLANYMLSREHSQTCHRHKGCMLCTMQAHITRALHNPGHVIQPSQALAAGFHRGKQEDAHEFLMFTVDAMKKACLPGHKQVDHHSKDTTLIHQIFGGYWRSQIKCLHCHGISDTFDPYLDIALDIQAAQSVQQALEQLVKPEELNGENAYHCGVCLQRAPASKTLTLHTSAKVLILVLKRFSDVTGNKIAKNVQYPECLDMQPYMSQTNTGPLVYVLYAVLVHAGWSCHNGHYFSYVKAQEGQWYKMDDAEVTASSITSVLSQQAYVLFYIQKSEWERHSESVSRGREPRALGAEDTDRRATQGELKRDHPCLQAPELDEHLVERATQESTLDHWKFLQEQNKTKPEFNVRKVEGTLPPDVLVIHQSKYKCGMKNHHPEQQSSLLKLSSTTPTHQESMNTGTLASLRGRARRSKGKNKHSKRALLVCQ

SEQ ID NO: 41 - protein, 553 aa, Homo sapiens
MEDDSLYLGGEWQFNHFSKLTSSRPDAAFAEIQRTSLPEKSPLSCETRVDLCDDLAPVARQLAPREKLPLSSRRPAAVGAGLQNMGNTCYVNASLQCLTYTPPLANYMLSREHSQTCHRHKGCMLCTMQAHITRALHNPGHVIQPSQALAAGFHRGKQEDAHEFLMFTVDAMKKACLPGHKQVDHHSKDTTLIHQIFGGYWRSQIKCLHCHGISDTFDPYLDIALDIQAAQSVQQALEQLVKPEELNGENAYHCGVCLQRAPASKTLTLHTSAKVLILVLKRFSDVTGNKIDKNVQYPECLDMKLYMSQTNSGPLVYVLYAVLVHAGWSCHNGHYFSYVKAQEGQWYKMDDAEVTASSITSVLSQQAYVLFYIQKSEWERHSESVSRGREPRALGAEDTDRRATQGELKRDHPCLQAPELDEHLVERATQESTLDHWKFLQEQNKTKPEFNVRKVEGTLPPDVLVIHQSKYKCGMKNHHPEQQSSLLNLSSTTPTHQESMNTGTLASLRGRARRSKGKNKHSKRALLVCQWSQWKYRPTRRGAHTHAHTQTHT

SEQ ID NO: 42 - protein, 1375 aa, Homo sapiens
MVPGEENQLVPKEDVFWRCRQNIFDEMKKKFLQIENAAEEPRVLCIIQDTTNSKTVNERITLNLPASTPVRKLFEDVANKVGYINGTFDLVWGNGINTADMAPLDHTSDKSLLDANFEPGKKNFLHLTDKDGEQPQILLEDSSAGEDSVHDRFIGPLPREGSGGSTSDYVSQSYSYSSILNKSETGYVGLVNQAMTCYLNSLLQTLFMTPEFRNALYKWEFEESEEDPVTSIPYQLQRLFVLLQTSKKRAIETTDVTRSFGWDSSEAWQQHDVQELCRVMFDALEQKWKQTEQADLINELYQGKLKDYVRCLECGYEGWRIDTYLDIPLVIRPYGSSQAFASVEEALHAFIQPEILDGPNQYFCERCKKKCDARKGLRFLHFPYLLTLQLKRFDFDYTTMHRIKLNDRMTFPEELDMSTFIDVEDEKSPQTESCTDSGAENEGSCHSDQMSNDFSNDDGVDEGICLETNSGTEKISKSGLEKNSLIYELFSVMVHSGSAAGGHYYACIKSFSDEQWYSFNDQHVSRITQEDIKKTHGGSSGSRGYYSSAFASSTNAYMLIYRLKDPARNAKFLEVDEYPEHIKNLVQKERELEEQEKRQREIERNTCKIKLFCLHPTKQVMMENKLEVHKDKTLKEAVEMAYKMMDLEEVIPLDCCRLVKYDEFHDYLERSYEGEEDTPMGLLLGGVKSTYMFDLLLETRKPDQVFQSYKPGEVMVKVHVVDLKAESVAAPITVRAYLNQTVTEFKQLISKAIHLPAETMRIVLERCYNDLRLLSVSSKTLKAEGFFRSNKVFVESSETLDYQMAFADSHLWKLLDRHANTIRLFVLLPEQSPVSYSKRTAYQKAGGDSGNVDDDCERVKGPVGSLKSVEAILEESTEKLKSLSLQQQQDGDNGDSSKSTETSDFENIESPLNERDSSASVDNRELEQHIQTSDPENFQSEERSDSDVNNDRSTSSVDSDILSSSHSSDTLCNADNAQIPLANGLDSHSITSSRRTKANEGKKETWDTAEEDSGTDSEYDESGKSRGEMQYMYFKAEPYAADEGSGEGHKWLMVHVDKRITLAAFKQHLEPFVGVLSSHFKVFRVYASNQEFESVRLNETLSSFSDDNKITIRLGRALKKGEYRVKVYQLLVNEQEPCKFLLDAVFAKGMTVRQSKEELIPQLREQCGLELSIDRFRLRKKTWKNPGTVFLDYHIYEEDINISSNWEVFLEVLDGVEKMKSMSQLAVLSRRWKPSEMKLDPFQEVVLESSSVDELREKLSEISGIPLDDIEFAKGRGTFPCDISVLDIHQDLDWNPKVSTLNVWPLYICDDGAVIFYRDKTEELMELTDEQRNELMKKESSRLQKTGHRVTYSPRKEKALKIYLDGAPNKDLTQD

SEQ ID NO: 43 - protein, 711 aa, Homo sapiens
MAQVRETSLPSGSGVRWISGGGGGASPEEAVEKAGKMEEAAAGATKASSRREAEEMKLEPLQEREPAPEENLTWSSSGGDEKVLPSIPLRCHSSSSPVCPRRKPRPRPQPRARSRSQPGLSAPPPPPARPPPPPPPPPPPAPRPRAWRGSRRRSRPGSRPQTRRSCSGDLDGSGDPGGLGDWLLEVEFGQGPTGCSHVESFKVGKNWQKNLRLIYQRFVWSGTPETRKRKAKSCICHVCSTHMNRLHSCLSCVFFGCFTEKHIHKHAETKQHHLAVDLYHGVIYCFMCKDYVYDKDIEQIAKETKEKILRLLTSTSTDVSHQQFMTSGFEDKQSTCETKEQEPKLVKPKKKRRKKSVYTVGLRGLINLGNTCFMNCIVQALTHIPLLKDFFLSDKHKCIMTSPSLCLVCEMSSLFHAMYSGSRTPHIPYKLLHLIWIHAEHLAGYRQQDAHEFLIAILDVLHRHSKDDSGGQEANNPNCCNCIIDQIFTGGLQSDVTCQACHSVSTTIDPCWDISLDLPGSCATFDSQNPERADSTVSRDDHIPGIPSLTDCLQWFTRPEHLGSSAKIKCNSCQSYQESTKQLTMKKLPIVACFHLKRFEHVGKQRRKINTFISFPLELDMTPFLASTKESRMKEGQPPTDCVPNENKYSLFAVINHHGTLESGHYTSFIRQQKDQWFSCDDAIITKATIEDLLYSEGYLLFYHKQGLEKD

SEQ ID NO: 44 - protein, 1123 aa, Homo sapiens
MPIVDKLKEALKPGRKDSADDGELGKLLASSAKKVLLQKIEFEPASKSFSYQLEALKSKYVLLNPKTEGASRHKSGDDPPARRQGSEHTYESCGDGVPAPQKVLFPTERLSLRWERVFRVGAGLHNLGNTCFLNATIQCLTYTPPLANYLLSKEHARSCHQGSFCMLCVMQNHIVQAFANSGNAIKPVSFIRDLKKIARHFRFGNQEDAHEFLRYTIDAMQKACLNGCAKLDRQTQATTLVHQIFGGYLRSRVKCSVCKSVSDTYDPYLDVALEIRQAANIVRALELFVKADVLSGENAYMCAKCKKKVPASKRFTIHRTSNVLTLSLKRFANFSGGKITKDVGYPEFLNIRPYMSQNNGDPVMYGLYAVLVHSGYSCHAGHYYCYVKASNGQWYQMNDSLVHSSNVKVVLNQQAYVLFYLRIPGSKKSPEGLISRTGSSSLPGRPSVIPDHSKKNIGNGIISSPLTGKRQDSGTMKKPHTTEEIGVPISRNGSTLGLKSQNGCIPPKLPSGSPSPKLSQTPTHMPTILDDPGKKVKKPAPPQHFSPRTAQGLPGTSNSNSSRSGSQRQGSWDSRDVVLSTSPKLLATATANGHGLKGNDESAGLDRRGSSSSSPEHSASSDSTKAPQTPRSGAAHLCDSQETNCSTAGHSKTPPSGADSKTVKLKSPVLSNTTTEPASTMSPPPAKKLALSAKKASTLWRATGNDLRPPPPSPSSDLTHPMKTSHPVVASTWPVHRARAVSPAPQSSSRLQPPFSPHPTLLSSTPKPPGTSEPRSCSSISTALPQVNEDLVSLPHQLPEASEPPQSPSEKRKKTFVGEPQRLGSETRLPQHIREATAAPHGKRKRKKKKRPEDTAASALQEGQTQRQPGSPMYRREGQAQLPAVRRQEDGTQPQVNGQQVGCVTDGHHASSRKRRRKGAEGLGEEGGLHQDPLRHSCSPMGDGDPEAMEESPRKKKKKKRKQETQRAVEEDGHLKCPRSAKPQDAVVPESSSCAPSANGWCPGDRMGLSQAPPVSWNGERESDVVQELLKYSSDKAYGRKVLTWDGKMSAVSQDAIEDSRQARTETVVDDWDEEFDRGKEKKIKKFKREKRRNFNAFQKLQTRRNFWSVTHPAKAASLSYRR

SEQ ID NO: 45 - protein, 712 aa, Homo sapiens
MLAMDTCKHVGQLQLAQDHSSLNPQKWHCVDCNTTESIWACLSCSHVACGRYIEEHALKHFQESSHPVALEVNEMYVFCYLCDDYVLNDNTTGDLKLLRRTLSAIKSQNYHCTTRSGRFLRSMGTGDDSYFLHDGAQSLLQSEDQLYTALWHRRRILMGKIFRTWFEQSPIGRKKQEEPFQEKIVVKREVKKRRQELEYQVKAELESMPPRKSLRLQGLAQSTIIEIVSVQVPAQTPASPAKDKVLSTSENEISQKVSDSSVKRRPIVTPGVTGLRNLGNTCYMNSVLQVLSHLLIFRQCFLKLDLNQWLAMTASEKTRSCKHPPVTDTVVYQMNECQEKDTGFVCSRQSSLSSGLSGGASKGRKMELIQPKEPTSQYISLCHELHTLFQVMWSGKWALVSPFAMLHSVWRLIPAFRGYAQQDAQEFLCELLDKIQRELETTGTSLPALIPTSQRKLIKQVLNVVNNIFHGQLLSQVTCLACDNKSNTIEPFWDLSLEFPERYQCSGKDIASQPCLVTEMLAKFTETEALEGKIYVCDQCNSKRRRFSSKPVVLTEAQKQLMICHLPQVLRLHLKRFRWSGRNNREKIGVHVGFEEILNMEPYCCRETLKSLRPECFIYDLSAVVMHHGKGFGSGHYTAYCYNSEGGFWVHCNDSKLSMCTMDEVCKAQAYILFYTQRVTENGHSKLLPPELLLGSQHPNEDADTSSNEILS

SEQ ID NO: 46 - protein, 1118 aa, Homo sapiens
MPAVASVPKELYLSSSLKDLNKKTEVKPEKISTKSYVHSALKIFKTAEECRLDRDEERAYVLYMKYVTVYNLIKKRPDFKQQQDYFHSILGPGNIKKAVEEAERLSESLKLRYEEAEVRKKLEEKDRQEEAQRLQQKRQETGREDGGTLAKGSLENVLDSKDKTQKSNGEKNEKCETKEKGAITAKELYTMMTDKNISLIIMDARRMQDYQDSCILHSLSVPEEAISPGVTASWIEAHLPDDSKDTWKKRGNVEYVVLLDWFSSAKDLQIGTTLRSLKDALFKWESKTVLRNEPLVLEGGYENWLLCYPQYTTNAKVTPPPRRQNEEVSISLDFTYPSLEESIPSKPAAQTPPASIEVDENIELISGQNERMGPLNISTPVEPVAASKSDVSPIIQPVPSIKNVPQIDRTKKPAVKLPEEHRIKSESTNHEQQSPQSGKVIPDRSTKPVVFSPTLMLTDEEKARIHAETALLMEKNKQEKELRERQQEEQKEKLRKEEQEQKAKKKQEAEENEITEKQQKAKEEMEKKESEQAKKEDKETSAKRGKEITGVKRQSKSEHETSDAKKSVEDRGKRCPTPEIQKKSTGDVPHTSVTGDSGSGKPFKIKGQPESGILRTGTFREDTDDTERNKAQREPLTRARSEEMGRIVPGLPSGWAKFLDPITGTFRYYHSPTNTVHMYPPEMAPSSAPPSTPPTHKAKPQIPAERDREPSKLKRSYSSPDITQAIQEEEKRKPTVTPTVNRENKPTCYPKAEISRLSASQIRNLNPVFGGSGPALTGLRNLGNTCYMNSILQCLCNAPHLADYFNRNCYQDDINRSNLLGHKGEVAEEFGIIMKALWTGQYRYISPKDFKITIGKINDQFAGYSQQDSQELLLFLMDGLHEDLNKADNRKRYKEENNDHLDDFKAAEHAWQKHKQLNESIIVALFQGQFKSTVQCLTCHKKSRTFEAFMYLSLPLASTSKCTLQDCLRLFSKEEKLTDNNRFYCSHCRARRDSLKKIEIWKLPPVLLVHLKRFSYDGRWKQKLQTSVDFPLENLDLSQYVIGPKNNLKKYNLFSVSNHYGGLDGGHYTAYCKNAARQRWFKFDDHEVSDISVSSVKSSAAYILFYTSLGPRVTDVAT

SEQ ID NO: 47 - protein, 979 aa, Homo sapiens
MSPLKIHGPIRIRSMQTGITKWKEGSFEIVEKENKVSLVVHYNTGGIPRIFQLSHNIKNVVLRPSGAKQSRLMLTLQDNSFLSIDKVPSKDAEEMRLFLDAVHQNRLPAAMKPSQGSGSFGAILGSRTSQKETSRQLSYSDNQASAKRGSLETKDDIPFRKVLGNPGRGSIKTVAGSGIARTIPSLTSTSTPLRSGLLENRTEKRKRMISTGSELNEDYPKENDSSSNNKAMTDPSRKYLTSSREKQLSLKQSEENRTSGLLPLQSSSFYGSRAGSKEHSSGGTNLDRTNVSSQTPSAKRSLGFLPQPVPLSVKKLRCNQDYTGWNKPRVPLSSHQQQQLQGFSNLGNTCYMNAILQSLFSLQSFANDLLKQGIPWKKIPLNALIRRFAHLLVKKDICNSETKKDLLKKVKNAISATAERFSGYMQNDAHEFLSQCLDQLKEDMEKLNKTWKTEPVSGEENSPDISATRAYTCPVITNLEFEVQHSIICKACGEIIPKREQFNDLSIDLPRRKKPLPPRSIQDSLDLFFRAEELEYSCEKCGGKCALVRHKFNRLPRVLILHLKRYSFNVALSLNNKIGQQVIIPRYLTLSSHCTENTKPPFTLGWSAHMAISRPLKASQMVNSCITSPSTPSKKFTFKSKSSLALCLDSDSEDELKRSVALSQRLCEMLGNEQQQEDLEKDSKLCPIEPDKSELENSGFDRMSEEELLAAVLEISKRDASPSLSHEDDDKPTSSPDTGFAEDDIQEMPENPDTMETEKPKTITELDPASFTEITKDCDENKENKTPEGSQGEVDWLQQYDMEREREEQELQQALAQSLQEQEAWEQKEDDDLKRATELSLQEFNNSFVDALGSDEDSGNEDVFDMEYTEAEAEELKRNAETGNLPHSYRLISVVSHIGSTSSSGHYISDVYDIKKQAWFTYNDLEVSKIQEAAVQSDRDRSGYIFFYMHKEIFDELLETEKNSQSLSTEVGKTTRQAL

SEQ ID NO: 48 - protein, 530 aa, Homo sapiens
MEEDSLYLGGEWQFNHFSKLTSSRLDAAFAEIQRTSLPEKSPLSCETRVDLCDDLVPEARQLAPREKLPLSSRRPAAVGAGLQNMGNTCYVNASLQCLTYTPPLANYMLSREHSQTCHRHKGCMLCTMQAHITRALHNPGHVIQPSQALAAGFHRGKQEDAHEFLMFTVDAMKKACLPGHKQVDHPSKDTTLIHQIFGGYWRSQIKCLHCHGISDTFDPYLDIALDIQAAQSVQQALEQLVKPEELNGENAYHCGVCLQRAPASKTLTLHTSAKVLILVLKRFSDVTGNKIAKNVQYPECLDMQPYMSQQNTGPLVYVLYAVLVHAGWSCHNGHYFSYVKAQEGQWYKMDDAEVTAASITSVLSQQAYVLFYIQKSEWERHSESVSRGREPRALGAEDTDRRATQGELKRDHPCLQAPELDEHLVERATQESTLDRWKFLQEQNKTKPEFNVRKVEGTLPPDVLVIHQSKYKCGMKNHHPEQQSSLLNLSSSTPTHQESMNTGTLASLRGRARRSKGKNKHSKRALLVCQ

SEQ ID NO: 49 - protein, 530 aa, Homo sapiens
MGDDSLYLGGEWQFNHFSKLTSSRPDAAFAEIQRTSLPEKSPLSSETRVDLCDDLAPVARQLAPREKLPLSSRRPAAVGAGLQNMGNTCYENASLQCLTYTLPLANYMLSREHSQTCQRPKCCMLCTMQAHITWALHSPGHVIQPSQALASGFHRGKQEDVHEFLMFTVDAMKKACLPGHKQVDHHSKDTTLIHQIFGGCWRSQIKCLHCHGISDTFDPYLDIALDIQAAQSVKQALEQLVKPEELNGENAYHCGLCLQRAPASNTLTLHTSAKVLILVLKRFSDVAGNKLAKNVQYPECLDMQPYMSQQNTGPLVYVLYAVLVHAGWSCHDGHYFSYVKAQEGQWYKMDDAEVTVCSITSVLSQQAYVLFYIQKSEWERHSESVSRGREPRALGAEDTDRRAKQGELKRDHPCLQAPELDEHLVERATQESTLDHWKFLQEQNKTKPEFNVGKVEGTLPPNALVIHQSKYKCGMKNHHPEQQSSLLNLSSTTRTDQESMNTGTLASLQGRTRRAKGKNKHSKRALLVCQ

SEQ ID NO: 50 - protein, 1684 aa, Homo sapiens
MSWKRNYFSGGRGSVQGMFAPRSSTSIAPSKGLSNEPGQNSCFLNSALQVLWHLDIFRRSFRQLTTHKCMGDSCIFCALKGIFNQFQCSSEKVLPSDTLRSALAKTFQDEQRFQLGIMDDAAECFENLLMRIHFHIADETKEDICTAQHCISHQKFAMTLFEQCVCTSCGATSDPLPFIQMVHYISTTSLCNQAICMLERREKPSPSMFGELLQNASTMGDLRNCPSNCGERIRIRRVLMNAPQIITIGLVWDSDHSDLAEDVIHSLGTCLKLGDLFFRVTDDRAKQSELYLVGMICYYGKHYSTFFFQTKIRKWMYFDDAHVKEIGPKWKDVVTKCIKGHYQPLLLLYADPQGTPVSTQDLPPQAEFQSYSRTCYDSEDSGREPSISSDTRTDSSTESYPYKHSHHESVVSHFSSDSQGTVIYNVENDSMSQSSRDTGHLTDSECNQKHTSKKGSLIERKRSSGRVRRKGDEPQASGYHSEGETLKEKQAPRNASKPSSSTNRLRDFKETVSNMIHNRPSLASQTNVGSHCRGRGGDQPDKKPPRTLPLHSRDWEIESTSSESKSSSSSKYRPTWRPKRESLNIDSIFSKDKRKHCGYTQLSPFSEDSAKEFIPDEPSKPPSYDIKFGGPSPQYKRWGPARPGSHLLEQHPRLIQRMESGYESSERNSSSPVSLDAALPESSNVYRDPSAKRSAGLVPSWRHIPKSHSSSILEVDSTASMGGWTKSQPFSGEEISSKSELDELQEEVARRAQEQELRRKREKELEAAKGFNPHPSRFMDLDELQNQGRSDGFERSLQEAESVFEESLHLEQKGDCAAALALCNEAISKLRLALHGASCSTHSRALVDKKLQISIRKARSLQDRMQQQQSPQQPSQPSACLPTQAGTLSQPTSEQPIPLQVLLSQEAQLESGMDTEFGASSFFHSPASCHESHSSLSPESSAPQHSSPSRSALKLLTSVEVDNIEPSAFHRQGLPKAPGWTEKNSHHSWEPLDAPEGKLQGSRCDNSSCSKLPPQEGRGIAQEQLFQEKKDPANPSPVMPGIATSERGDEHSLGCSPSNSSAQPSLPLYRTCHPIMPVASSFVLHCPDPVQKTNQCLQGQSLKTSLTLKVDRGSEETYRPEFPSTKGLVRSLAEQFQRMQGVSMRDSTGFKDRSLSGSLRKNSSPSDSKPPFSQGQEKGHWPWAKQQSSLEGGDRPLSWEESTEHSSLALNSGLPNGETSSGGQPRLAEPDIYQEKLSQVRDVRSKDLGSSTDLGTSLPLDSWVNITRFCDSQLKHGAPRPGMKSSPHDSHTCVTYPERNHILLHPHWNQDTEQETSELESLYQASLQASQAGCSGWGQQDTAWHPLSQTGSADGMGRRLHSAHDPGLSKTSTAEMEHGLHEARTVRTSQATPCRGLSRECGEDEQYSAENLRRISRSLSGTVVSEREEAPVSSHSFDSSNVRKPLETGHRCSSSSSLPVIHDPSVFLLGPQLYLPQPQFLSPDVLMPTMAGEPNRLPGTSRSVQQFLAMCDRGETSQGAKYTGRTLNYQSLPHRSRTDNSWAPWSETNQHIGTRFLTTPGCNPQLTYTATLPERSKGLQVPHTQSWSDLFHSPSHPPIVHPVYPPSSSLHVPLRSAWNSDPVPGSRTPGPRRVDMPPDDDWRQSSYASHSGHRRTVGEGFLFVLSDAPRREQIRARVLQHSQW

SEQ ID NO: 51 - protein, 565 aa, Homo sapiens
MSGRSKRESRGSTRGKRESESRGSSGRVKRERDREREPEAASSRGSPVRVKREFEPASAREAPASVVPFVRVKREREVDEDSEPEREVRAKNGRVDSEDRRSRHCPYLDTINRSVLDFDFEKLCSISLSHINAYACLVCGKYFQGRGLKSHAYIHSVQFSHHVFLNLHTLKFYCLPDNYEIIDSSLEDITYVLKPTFTKQQIANLDKQAKLSRAYDGTTYLPGIVGLNNIKANDYANAVLQALSNVPPLRNYFLEEDNYKNIKRPPGDIMFLLVQRFGELMRKLWNPRNFKAHVSPHEMLQAVVLCSKKTFQITKQGDGVDFLSWFLNALHSALGGTKKKKKTIVTDVFQGSMRIFTKKLPHPDLPAEEKEQLLHNDEYQETMVESTFMYLTLDLPTAPLYKDEKEQLIIPQVPLFNILAKFNGITEKEYKTYKENFLKRFQLTKLPPYLIFCIKRFTKNNFFVEKNPTIVNFPITNVDLREYLSEEVQAVHKNTTYDLIANIVHDGKPSEGSYRIHVLHHGTGKWYELQDLQVTDILPQMITLSEAYIQIWKRRDNDETNQQGA

SEQ ID NO: 52 - protein, 1018 aa, Homo sapiens
MDKILEAVVTSSYPVSVKQGLVRRVLEAARQPLEREQCLALLALGARLYVGGAEELPRRVGCQLLHVAGRHHPDVFAEFFSARRVLRLLQGGAGPPGPRALACVQLGLQLLPEGPAADEVFALLRREVLRTVCERPGPAACAQVARLLARHPRCVPDGPHRLLFCQQLVRCLGRFRCPAEGEEGAVEFLEQAQQVSGLLAQLWRAQPAAILPCLKELFAVISCAEEEPPSSALASVVQHLPLELMDGVVRNLSNDDSVTDSQMLTAISRMIDWVSWPLGKNIDKWIIALLKGLAAVKKFSILIEVSLTKIEKVFSKLLYPIVRGAALSVLKYMLLTFQHSHEAFHLLLPHIPPMVASLVKEDSNSGTSCLEQLAELVHCMVFRFPGFPDLYEPVMEAIKDLHVPNEDRIKQLLGQDAWTSQKSELAGFYPRLMAKSDTGKIGLINLGNTCYVNSILQALFMASDFRHCVLRLTENNSQPLMTKLQWLFGFLEHSQRPAISPENFLSASWTPWFSPGTQQDCSEYLKYLLDRLHEEEKTGTRICQKLKQSSSPSPPEEPPAPSSTSVEKMFGGKIVTRICCLCCLNVSSREEAFTDLSLAFPPPERCRRRRLGSVMRPTEDITARELPPPTSAQGPGRVGPRRQRKHCITEDTPPTSLYIEGLDSKEAGGQSSQEERIEREEEGKEERTEKEEVGEEEESTRGEGEREKEEEVEEEEEKVEKETEKEAEQEKEEDSLGAGTHPDAAIPSGERTCGSEGSRSVLDLVNYFLSPEKLTAENRYYCESCASLQDAEKVVELSQGPCYLILTLLRFSFDLRTMRRRKILDDVSIPLLLRLPLAGGRGQAYDLCSVVVHSGVSSESGHYYCYAREGAARPAASLGTADRPEPENQWYLFNDTRVSFSSFESVSNVTSFFPKDTAYVLFYRQRPREGPEAELGSSRVRTEPTLHKDLMEAISKDNILYLQEQEKEARSRAAYISALPTSPHWGRGFDEDKDEDEGSPGGCNPAGGNGGDFHRLVF

SEQ ID NO: 53 - protein, 981 aa, Homo sapiens
MAEGGAADLDTQRSDIATLLKTSLRKGDTWYLVDSRWFKQWKKYVGFDSWDKYQMGDQNVYPGPIDNSGLLKDGDAQSLKEHLIDELDYILLPTEGWNKLVSWYTLMEGQEPIARKVVEQGMFVKHCKVEVYLTELKLCENGNMNNVVTRRFSKADTIDTIEKEIRKIFSIPDEKETRLWNKYMSNTFEPLNKPDSTIQDAGLYQGQVLVIEQKNEDGTWPRGPSTPKSPGASNFSTLPKISPSSLSNNYNNMNNRNVKNSNYCLPSYTAYKNYDYSEPGRNNEQPGLCGLSNLGNTCFMNSAIQCLSNTPPLTEYFLNDKYQEELNFDNPLGMRGEIAKSYAELIKQMWSGKFSYVTPRAFKTQVGRFAPQFSGYQQQDCQELLAFLLDGLHEDLNRIRKKPYIQLKDADGRPDKVVAEEAWENHLKRNDSIIVDIFHGLFKSTLVCPECAKISVTFDPFCYLTLPLPMKKERTLEVYLVRMDPLTKPMQYKVVVPKIGNILDLCTALSALSGIPADKMIVTDIYNHRFHRIFAMDENLSSIMERDDIYVFEININRTEDTEHVIIPVCLREKFRHSSYTHHTGSSLFGQPFLMAVPRNNTEDKLYNLLLLRMCRYVKISTETEETEGSLHCCKDQNINGNGPNGIHEEGSPSEMETDEPDDESSQDQELPSENENSQSEDSVGGDNDSENGLCTEDTCKGQLTGHKKRLFTFQFNNLGNTDINYIKDDTRHIRFDDRQLRLDERSFLALDWDPDLKKRYFDENAAEDFEKHESVEYKPPKKPFVKLKDCIELFTTKEKLGAEDPWYCPNCKEHQQATKKLDLWSLPPVLVVHLKRFSYSRYMRDKLDTLVDFPINDLDMSEFLINPNAGPCRYNLIAVSNHYGGMGGGHYTAFAKNKDDGKWYYFDDSSVSTASEDQIVSKAAYVLFYQRQDTFSGTGFFPLDRETKGASAATGIPLESDEDSNDNDNDIENENCMHTN

SEQ ID NO: 54 - protein, 922 aa, Homo sapiens
MISLKVCGFIQIWSQKTGMTKLKEALIETVQRQKEIKLVVTFKSGKFIRIFQLSNNIRSVVLRHCKKRQSHLRLTLKNNVFLFIDKLSYRDAKQLNMFLDIIHQNKSQQPMKSDDDWSVFESRNMLKEIDKTSFYSICNKPSYQKMPLFMSKSPTHVKKGILENQGGKGQNTLSSDVQTNEDILKEDNPVPNKKYKTDSLKYIQSNRKNPSSLEDLEKDRDLKLGPSFNTNCNGNPNLDETVLATQTLNAKNGLTSPLEPEHSQGDPRCNKAQVPLDSHSQQLQQGFPNLGNTCYMNAVLQSLFAIPSFADDLLTQGVPWEYIPFEALIMTLTQLLALKDFCSTKIKRELLGNVKKVISAVAEIFSGNMQNDAHEFLGQCLDQLKEDMEKLNATLNTGKECGDENSSPQMHVGSAATKVFVCPVVANFEFELQLSLICKACGHAVLKVEPNNYLSINLHQETKPLPLSIQNSLDLFFKEEELEYNCQMCKQKSCVARHTFSRLSRVLIIHLKRYSFNNAWLLVKNNEQVYIPKSLSLSSYCNESTKPPLPLSSSAPVGKCEVLEVSQEMISEINSPLTPSMKLTSESSDSLVLPVEPDKNADLQRFQRDCGDASQEQHQRDLENGSALESELVHFRDRAIGEKELPVADSLMDQGDISLPVMYEDGGKLISSPDTRLVEVHLQEVPQHPELQKYEKTNTFVEFNFDSVTESTNGFYDCKENRIPEGSQGMAEQLQQCIEESIIDEFLQQAPPPGVRKLDAQEHTEETLNQSTELRLQKADLNHLGALGSDNPGNKNILDAENTRGEAKELTRNVKMGDPLQAYRLISVVSHIGSSPNSGHYISDVYDFQKQAWFTYNDLCVSEISETKMQEARLHSGYIFFYMHNGIFEELLRKAENSRLPSTQAGVIPQGEYEGDSLYRPA

SEQ ID NO: 55 - protein, 1406 aa, Homo sapiens
MDMVENADSLQAQERKDILMKYDKGHRAGLPEDKGPEPVGINSSIDRFGILHETELPPVTAREAKKIRREMTRTSKWMEMLGEWETYKHSSKLIDRVYKGIPMNIRGPVWSVLLNIQEIKLKNPGRYQIMKERGKRSSEHIHHIDLDVRTTLRNHVFFRDRYGAKQRELFYILLAYSEYNPEVGYCRDLSHITALFLLYLPEEDAFWALVQLLASERHSLPGFHSPNGGTVQGLQDQQEHVVPKSQPKTMWHQDKEGLCGQCASLGCLLRNLIDGISLGLTLRLWDVYLVEGEQVLMPITSIALKVQQKRLMKTSRCGLWARLRNQFFDTWAMNDDTVLKHLRASTKKLTRKQGDLPPPAKREQGSLAPRPVPASRGGKTLCKGYRQAPPGPPAQFQRPICSASPPWASRFSTPCPGGAVREDTYPVGTQGVPSLALAQGGPQGSWRFLEWKSMPRLPTDLDIGGPWFPHYDFEWSCWVRAISQEDQLATCWQAEHCGEVHNKDMSWPEEMSFTANSSKIDRQKVPTEKGATGLSNLGNTCFMNSSIQCVSNTQPLTQYFISGRHLYELNRTNPIGMKGHMAKCYGDLVQELWSGTQKSVAPLKLRRTIAKYAPKFDGFQQQDSQELLAFLLDGLHEDLNRVHEKPYVELKDSDGRPDWEVAAEAWDNHLRRNRSIIVDLFHGQLRSQVKCKTCGHISVRFDPFNFLSLPLPMDSYMDLEITVIKLDGTTPVRYGLRLNMDEKYTGLKKQLRDLCGLNSEQILLAEVHDSNIKNFPQDNQKVQLSVSGFLCAFEIPVPSSPISASSPTQIDFSSSPSTNGMFTLTTNGDLPKPIFIPNGMPNTVVPCGTEKNFTNGMVNGHMPSLPDSPFTGYIIAVHRKMMRTELYFLSPQENRPSLFGMPLIVPCTVHTRKKDLYDAVWIQVSWLARPLPPQEASIHAQDRDNCMGYQYPFTLRVVQKDGNSCAWCPQYRFCRGCKIDCGEDRAFIGNAYIAVDWHPTALHLRYQTSQERVVDKHESVEQSRRAQAEPINLDSCLRAFTSEEELGESEMYYCSKCKTHCLATKKLDLWRLPPFLIIHLKRFQFVNDQWIKSQKIVRFLRESFDPSAFLVPRDPALCQHKPLTPQGDELSKPRILAREVKKVDAQSSAGKEDMLLSKSPSSLSANISSSPKGSPSSSRKSGTSCPSSKNSSPNSSPRTLGRSKGRLRLPQIGSKNKPSSSKKNLDASKENGAGQICELADALSRGHMRGGSQPELVTPQDHEVALANGFLYEHEACGNGCGDGYSNGQLGNHSEEDSTDDQREDTHIKPIYNLYAISCHSGILSGGHYITYAKNPNCKWYCYNDSSCEELHPDEIDTDSAYILFYEQQGIDYAQFLPKIDGKKMADTSSTDEDSESDYEKYSMLQ

SEQ ID NO: 56 - protein, 1073 aa, Homo sapiens
MAWVKFLRKPGGNLGKVYQPGSMLSLAPTKGLLNEPGQNSCFLNSAVQVLWQLDIFRRSLRVLTGHVCQGDACIFCALKTIFAQFQHSREKALPSDNIRHALAESFKDEQRFQLGLMDDAAECFENMLERIHFHIVPSRDADMCTSKSCITHQKFAMTLYEQCVCRSCGASSDPLPFTEFVRYISTTALCNEVERMLERHERFKPEMFAELLQAANTTDDYRKCPSNCGQKIKIRRVLMNCPEIVTIGLVWDSEHSDLTEAVVRNLATHLYLPGLFYRVTDENAKNSELNLVGMICYTSQHYCAFAFHTKSSKWVFFDDANVKEIGTRWKDVVSKCIRCHFQPLLLFYANPDGTAVSTEDALRQVISWSHYKSVAENMGCEKPVIHKSDNLKENGFGDQAKQRENQKFPTDNISSSNRSHSHTGVGKGPAKLSHIDQREKIKDISRECALKAIEQKNLLSSQRKDLEKGQRKDLGRHRDLVDEDLSHFQSGSPPAPNGFKQHGNPHLYHSQGKGSYKHDRVVPQSRASAQIISSSKSQILAPGEKITGKVKSDNGTGYDTDSSQDSRDRGNSCDSSSKSRNRGWKPMRETLNVDSIFSESEKRQHSPRHKPNISNKPKSSKDPSFSNWPKENPKQKGLMTIYEDEMKQEIGSRSSLESNGKGAEKNKGLVEGKVHGDNWQMQRTESGYESSDHISNGSTNLDSPVIDGNGTVMDISGVKETVCFSDQITTSNLNKERGDCTSLQSQHHLEGFRKELRNLEAGYKSHEFHPESHLQIKNHLIKRSHVHEDNGKLFPSSSLQIPKDHNAREHIHQSDEQKLEKPNECKFSEWLNIENSERTGLPFHVDNSASGKRVNSNEPSSLWSSHLRTVGLKPETAPLIQQQNIMDQCYFENSLSTECIIRSASRSDGCQMPKLFCQNLPPPLPPKKYAITSVPQSEKSESTPDVKLTEVFKATSHLPKHSLSTASEPSLEVSTHMNDERHKETFQVRECFGNTPNCPSSSSTNDFQANSGAIDAFCQPELDSISTCPNETVSLTTYFSVDSCMTDTYRLKYHQRPKLSFPESSGFCNNSLS

SEQ ID NO: 57 - protein, 1060 aa, Homo sapiens
MEDDSLYLRGEWQFNHFSKLTSSRPDAAFAEIQRTSLPEKSPLSCETRVDLCDDLAPVARQLAPREKLPLSSRRPAAVGAGLQNMGNTCYVNASLQCLTYTPPLANYMLSREHSQTCHRHKGCMLCTMQAHITRALHNPGHVIQPSQALAAGFHRGKQEDAHEFLMFTVDAMKKACLPGHKQVDHHSKDTTLIHQIFGGYWRSQIKCLHCHGISDTFDPYLDIALDIQAAQSVQQALEQLVKPEELNGENAYHCGVCLQRAPASKTLTLHTSAKVLILVLKRFSDVTGNKIAKNVQYPECLDMQPYMSQPNTGPLVYVLYAVLVHAGWSCHNGHYFSYVKAQEGQWYKMDDAEVTASSITSVLSQQAYVLFYIQKSEWERHSESVSRGREPRALGAEDTDRRATQGELKRDHPCLQAPELDEHLVERATQESTLDHWKFLQEQNKTKPEFNVRKVEGTLPPDVLVIHQSKYKCGMKNHHPEQQSSLLNLSSSTPTHQESMNTGTLASLRGRARRSKGKNKHSKRALLVCQMEDDSLYLGGEWQFNHFSKLTSSRPDAAFAEIQRTSLPEKSPLSCETRVDLCDDLAPVARQLAPREKLPLSSRRPAAVGAGLQNMGNTCYVNASLQCLTYTPPLANYMLSREHSQTCHRHKGCMLCTMQAHITRALHNPGHVIQPSQALAAGFHRGKQEDAHEFLMFTVDAMKKACLPGHKQVDHHSKDTTLIHQIFGGYWRSQIKCLHCHGISDTFDPYLDIALDIQAAQSVQQALEQLVKPEELNGENAYHCGVCLQRAPASKTLTLHTSAKVLILVLKRFSDVTGNKIAKNVQYPECLDMQPYMSQQNTGPLVYVLYAVLVHAGWSCHNGHYFSYVKAQEGQWYKMDDAEVTASSITSVLSQQAYVLFYIQKSEWERHSESVSRGREPRALGAEDTDRRATQGELKRDHPCLQAPELDEHLVERATQESTLDHWKFLQEQNKTKPEFNVRKVEGTLPPDVLVIHQSKYKCGMKNHHPEQQSSLLKLSSTTPTHQESMNTGTLASLRGRARRSKGKNKHSKRALLVCQ

SEQ ID NO: 58 - protein, 858 aa, Homo sapiens
MAELSEEALLSVLPTIRVPKAGDRVHKDECAFSFDTPESEGGLYICMNTFLGFGKQYVERHFNKTGQRVYLHLRRTRRPKEEDPATGTGDPPRKKPTRLAIGVEGGFDLSEEKFELDEDVKIVILPDYLEIARDGLGGLPDIVRDRVTSAVEALLSADSASRKQEVQAWDGEVRQVSKHAFSLKQLDNPARIPPCGWKCSKCDMRENLWLNLTDGSILCGRRYFDGSGGNNHAVEHYRETGYPLAVKLGTITPDGADVYSYDEDDMVLDPSLAEHLSHFGIDMLKMQKTDKTMTELEIDMNQRIGEWELIQESGVPLKPLFGPGYTGIRNLGNSCYLNSVVQVLFSIPDFQRKYVDKLEKIFQNAPTDPTQDFSTQVAKLGHGLLSGEYSKPVPESGDGERVPEQKEVQDGIAPRMFKALIGKGHPEFSTNRQQDAQEFFLHLINMVERNCRSSENPNEVFRFLVEEKIKCLATEKVKYTQRVDYIMQLPVPMDAALNKEELLEYEEKKRQAEEEKMALPELVRAQVPFSSCLEAYGAPEQVDDFWSTALQAKSVAVKTTRFASFPDYLVIQIKKFTFGLDWVPKKLDVSIEMPEELDISQLRGTGLQPGEEELPDIAPPLVTPDEPKGSLGFYGNEDEDSFCSPHFSSPTSPMLDESVIIQLVEMGFPMDACRKAVYYTGNSGAEAAMNWVMSHMDDPDFANPLILPGSSGPGSTSAAADPPPEDCVTTIVSMGFSRDQALKALRATNNSLERAVDWIFSHIDDLDAEAAMDISEGRSAADSISESVPVGPKVRDGPGKYQLFAFISHMGTSTMCGHYVCHIKKEGRWVIYNDQKVCASEKPPKDLGYIYFYQRVAS

SEQ ID NO: 59 - protein, 1055 aa, Homo sapiens
MTVEQNVLQQSAAQKHQQTFLNQLREITGINDTQILQQALKDSNGNLELAVAFLTAKNAKTPQQEETTYYQTALPGNDRYISVGSQADTNVIDLTGDDKDDLQRAIALSLAESNRAFRETGITDEEQAISRVLEASIAENKACLKRTPTEVWRDSRNPYDRKRQDKAPVGLKNVGNTCWFSAVIQSLFNLLEFRRLVLNYKPPSNAQDLPRNQKEHRNLPFMRELRYLFALLVGTKRKYVDPSRAVEILKDAFKSNDSQQQDVSEFTHKLLDWLEDAFQMKAEEETDEEKPKNPMVELFYGRFLAVGVLEGKKFENTEMFGQYPLQVNGFKDLHECLEAAMIEGEIESLHSENSGKSGQEHWFTELPPVLTFELSRFEFNQALGRPEKIHNKLEFPQVLYLDRYMHRNREITRIKREEIKRLKDYLTVLQQRLERYLSYGSGPKRFPLVDVLQYALEFASSKPVCTSPVDDIDASSPPSGSIPSQTLPSTTEQQGALSSELPSTSPSSVAAISSRSVIHKPFTQSRIPPDLPMHPAPRHITEEELSVLESCLHRWRTEIENDTRDLQESISRIHRTIELMYSDKSMIQVPYRLHAVLVHEGQANAGHYWAYIFDHRESRWMKYNDIAVTKSSWEELVRDSFGGYRNASAYCLMYINDKAQFLIQEEFNKETGQPLVGIETLPPDLRDFVEEDNQRFEKELEEWDAQLAQKALQEKLLASQKLRESETSVTTAQAAGDPEYLEQPSRSDFSKHLKEETIQIITKASHEHEDKSPETVLQSAIKLEYARLVKLAQEDTPPETDYRLHHVVVYFIQNQAPKKIIEKTLLEQFGDRNLSFDERCHNIMKVAQAKLEMIKPEEVNLEEYEEWHQDYRKFRETTMYLIIGLENFQRESYIDSLLFLICAYQNNKELLSKGLYRGHDEELISHYRRECLLKLNEQAAELFESGEDREVNNGLIIMNEFIVPFLPLLLVDEMEEKDILAVEDMRNRWCSYLGQEMEPHLQEKLTDFLPKLLDCSMEIKSFHEPPKLPSYSTHELCERFARIMLSLSRTPADGR

SEQ ID NO: 60 - protein, 942 aa, Homo sapiens
MTGSNSHITILTLKVLPHFESLGKQEKIPNKMSAFRNHCPHLDSVGEITKEDLIQKSLGTCQDCKVQGPNLWACLENRCSYVGCGESQVDHSTIHSQETKHYLTVNLTTLRVWCYACSKEVFLDRKLGTQPSLPHVRQPHQIQENSVQDFKIPSNTTLKTPLVAVFDDLDIEADEEDELRARGLTGLKNIGNTCYMNAALQALSNCPPLTQFFLDCGGLARTDKKPAICKSYLKLMTELWHKSRPGSVVPTTLFQGIKTVNPTFRGYSQQDAQEFLRCLMDLLHEELKEQVMEVEEDPQTITTEETMEEDKSQSDVDFQSCESCSNSDRAENENGSRCFSEDNNETTMLIQDDENNSEMSKDWQKEKMCNKINKVNSEGEFDKDRDSISETVDLNNQETVKVQIHSRASEYITDVHSNDLSTPQILPSNEGVNPRLSASPPKSGNLWPGLAPPHKKAQSASPKRKKQHKKYRSVISDIFDGTIISSVQCLTCDRVSVTLETFQDLSLPIPGKEDLAKLHSSSHPTSIVKAGSCGEAYAPQGWIAFFMEYVKRFVVSCVPSWFWGPVVTLQDCLAAFFARDELKGDNMYSCEKCKKLRNGVKFCKVQNFPEILCIHLKRFRHELMFSTKISTHVSFPLEGLDLQPFLAKDSPAQIVTYDLLSVICHHGTASSGHYIAYCRNNLNNLWYEFDDQSVTEVSESTVQNAEAYVLFYRKSSEEAQKERRRISNLLNIMEPSLLQFYISRQWLNKFKTFAEPGPISNNDFLCIHGGVPPRKAGYIEDLVLMLPQNIWDNLYSRYGGGPAVNHLYICHTCQIEAEKIEKRRKTELEIFIRLNRAFQKEDSPATFYCISMQWFREWESFVKGKDGDPPGPIDNTKIAVTKCGNVMLRQGADSGQISEETWNFLQSIYGGGPEVILRPPVVHVDPDILQAEEKIEVETRSL

SEQ ID NO: 61 - protein, 565 aa, Homo sapiens
MPQASEHRLGRTREPPVNIQPRVGSKLPFAPRARSKERRNPASGPNPMLRPLPPRPGLPDERLKKLELGRGRTSGPRPRGPLRADHGVPLPGSPPPTVALPLPSRTNLARSKSVSSGDLRPMGIALGGHRGTGELGAALSRLALRPEPPTLRRSTSLRRLGGFPGPPTLFSIRTEPPASHGSFHMISARSSEPFYSDDKMAHHTLLLGSGHVGLRNLGNTCFLNAVLQCLSSTRPLRDFCLRRDFRQEVPGGGRAQELTEAFADVIGALWHPDSCEAVNPTRFRAVFQKYVPSFSGYSQQDAQEFLKLLMERLHLEINRRGRRAPPILANGPVPSPPRRGGALLEEPELSDDDRANLMWKRYLEREDSKIVDLFVGQLKSCLKCQACGYRSTTFEVFCDLSLPIPKKGFAGGKVSLRDCFNLFTKEEELESENAPVCDRCRQKTRSTKKLTVQRFPRILVLHLNRFSASRGSIKKSSVGVDFPLQRLSLGDFASDKAGSPVYQLYALCNHSGSVHYGHYTALCRCQTGWHVYNDSRVSPVSENQVASSEGYVLFYQLMQEPPRCL

SEQ ID NO: 62 - protein, 530 aa, Homo sapiens
MGDDSLYLGGEWQFNHFSKLTSSRPDAAFAEIQRTSLPEKSPLSSETRVDLCDDLAPVARQLAPREKLPLSSRRPAAVGAGLQNMGNTCYENASLQCLTYTLPLANYMLSREHSQTCQRPKCCMLCTMQAHITWALHSPGHVIQPSQALAAGFHRGKQEDVHEFLMFTVDAMKKACLPGHKQVDHHSKDTTLIHQIFGGCWRSQIKCLHCHGISDTFDPYLDIALDIQAAQSVKQALEQLVKPEELNGENAYHCGLCLQRAPASNTLTLHTSAKVLILVLKRFSDVAGNKLAKNVQYPECLDMQPYMSQQNTGPLVYVLYAVLVHAGWSCHDGYYFSYVKAQEGQWYKMDDAEVTVCSITSVLSQQAYVLFYIQKSEWERHSESVSRGREPRALGAEDTDRPATQGELKRDHPCLQVPELDEHLVERATEESTLDHWKFPQEQNKMKPEFNVRKVEGTLPPNVLVIHQSKYKCGMKNHHPEQQSSLLNLSSMNSTDQESMNTGTLASLQGRTRRSKGKNKHSKRSLLVCQ

SEQ ID NO: 63 - protein, 530 aa, Homo sapiens
MEDDSLYLGGEWQFNHFSKLTSSRPDAAFAEIQRTSLPEKSPLSCETRVDLCDDLAPVARQLAPREKLPLSSRRPAAVGAGLQNMGNTCYVNASLQCLTYTPPLANYMLSREHSQTCHRHKGCMLCTMQAHITRALHNPGHVIQPSQALAAGFHRGKQEDAHEFLMFTVDAMKKACLPGHKQVDHHSKDTTLIHQIFGGYWRSQIKCLHCHGISDTFDPYLDIALDIQAAQSVQQALEQLVKPEELNGENAYHCGVCLQRAPASKTLTLHTSAKVLILVLKRFSDVTGNKIAKNVQYPECLDMQPYMSQPNTGPLVYVLYAVLVHAGWSCHNGHYFSYVKAQEGQWYKMDDAEVTASSITSVLSQQAYVLFYIQKSEWERHSESVSRGREPRALGAEDTDRRATQGELKRDHPCLQAPELDEHLVERATQESTLDHWKFLQEQNKTKPEFNVRKVEGTLPPDVLVIHQSKYKCGMKNHHPEQQSSLLNLSSTTPTHQESMNTGTLASLRGRARRSKGKNKHSKRALLVCQ

SEQ ID NO: 64 - protein, 370 aa, Homo sapiens
MEILMTVSKFASICTMGANASALEKEIGPEQFPVNEHYFGLVNFGNTCYCNSVLQALYFCRPFREKVLAYKSQPRKKESLLTCLADLFHSIATQKKKVGVIPPKKFITRLRKENELFDNYMQQDAHEFLNYLLNTIADILQEERKQEKQNGRLPNGNIDNENNNSTPDPTWVHEIFQGTLTNETRCLTCETISSKDEDFLDLSVDVEQNTSITHCLRGFSNTETLCSEYKYYCEECRSKQEAHKRMKVKKLPMILALHLKRFKYMDQLHRYTKLSYRVVFPLELRLFNTSGDATNPDRMYDLVAVVVHCGSGPNRGHYIAIVKSHDFWLLFDDDIVEKIDAQAIEEFYGLTSDISKNSESGYILFYQSRD

SEQ ID NO: 65 - protein, 530 aa, Homo sapiens
MEEDSLYLGGEWQFNHFSKLTSSRPDAAFAEIQRTSLPEKSPLSCETRVDLCDDLAPVARQLAPREKLPLSNRRPAAVGAGLQNMGNTCYVNASLQCLTYTPPLANYMLSREHSQTCHRHKGCMLCTMQAHITRALHNPGHVIQPSQALAAGFHRGKQEDAHEFLMFTVDAMKKACLPGHKQVDHHSKDTTLIHQIFGGYWRSQIKCLHCHGISDTFDPYLDIALDIQAAQSVQQALEQLVKPEELNGENAYHCGVCLQRAPASKMLTLLTSAKVLILVLKRFSDVTGNKIAKNVQYPECLDMQPYMSQPNTGPLVYVLYAVLVHAGWSCHNGHYFSYVKAQEGQWYKMDDAEVTASSITSVLSQQAYVLFYIQKSEWERHSESVSRGREPRALGAEDTDRRATQGELKRDHPCLQAPELDEHLVERATQESTLDHWKFLQEQNKTKPEFNVRKVEGTLPPDVLVIHQSKYKCGMKNHHPEQQSSLLKLSSTTPTHQESMNTGTLASLRGRARRSKGKNKHSKRALLVCQ

SEQ ID NO: 66 - protein, 914 aa, Homo sapiens
MGDSRDLCPHLDSIGEVTKEDLLLKSKGTCQSCGVTGPNLWACLQVACPYVGCGESFADHSTIHAQAKKHNLTVNLTTFRLWCYACEKEVFLEQRLAAPLLGSSSKFSEQDSPPPSHPLKAVPIAVADEGESESEDDDLKPRGLTGMKNLGNSCYMNAALQALSNCPPLTQFFLECGGLVRTDKKPALCKSYQKLVSEVWHKKRPSYVVPTSLSHGIKLVNPMFRGYAQQDTQEFLRCLMDQLHEELKEPVVATVALTEARDSDSSDTDEKREGDRSPSEDEFLSCDSSSDRGEGDGQGRGGGSSQAETELLIPDEAGRAISEKERMKDRKFSWGQQRTNSEQVDEDADVDTAMAALDDQPAEAQPPSPRSSSPCRTPEPDNDAHLRSSSRPCSPVHHHEGHAKLSSSPPRASPVRMAPSYVLKKAQVLSAGSRRRKEQRYRSVISDIFDGSILSLVQCLTCDRVSTTVETFQDLSLPIPGKEDLAKLHSAIYQNVPAKPGACGDSYAAQGWLAFIVEYIRRFVVSCTPSWFWGPVVTLEDCLAAFFAADELKGDNMYSCERCKKLRNGVKYCKVLRLPEILCIHLKRFRHEVMYSFKINSHVSFPLEGLDLRPFLAKECTSQITTYDLLSVICHHGTAGSGHYIAYCQNVINGQWYEFDDQYVTEVHETVVQNAEGYVLFYRKSSEEAMRERQQVVSLAAMREPSLLRFYVSREWLNKFNTFAEPGPITNQTFLCSHGGIPPHKYHYIDDLVVILPQNVWEHLYNRFGGGPAVNHLYVCSICQVEIEALAKRRRIEIDTFIKLNKAFQAEESPGVIYCISMQWFREWEAFVKGKDNEPPGPIDNSRIAQVKGSGHVQLKQGADYGQISEETWTYLNSLYGGGPEIAIRQSVAQPLGPENLHGEQKIEAETRAV

SEQ ID NO: 67 - protein, 366 aa, Homo sapiens
MTVRNIASICNMGTNASALEKDIGPEQFPINEHYFGLVNFGNTCYCNSVLQALYFCRPFRENVLAYKAQQKKKENLLTCLADLFHSIATQKKKVGVIPPKKFISRLRKENDLFDNYMQQDAHEFLNYLLNTIADILQEEKKQEKQNGKLKNGNMNEPAENNKPELTWVHEIFQGTLTNETRCLNCETVSSKDEDFLDLSVDVEQNTSITHCLRDFSNTETLCSEQKYYCETCCSKQEAQKRMRVKKLPMILALHLKRFKYMEQLHRYTKLSYRVVFPLELRLFNTSSDAVNLDRMYDLVAVVVHCGSGPNRGHYITIVKSHGFWLLFDDDIVEKIDAQAIEEFYGLTSDISKNSESGYILFYQSRE

SEQ ID NO: 68 - protein, 956 aa, Homo sapiens
MSSGLWSQEKVTSPYWEERIFYLLLQECSVTDKQTQKLLKVPKGSIGQYIQDRSVGHSRIPSAKGKKNQIGLKILEQPHAVLFVDEKDVVEINEKFTELLLAITNCEERFSLFKNRNRLSKGLQIDVGCPVKVQLRSGEEKFPGVVRFRGPLLAERTVSGIFFGVELLEEGRGQGFTDGVYQGKQLFQCDEDCGVFVALDKLELIEDDDTALESDYAGPGDTMQVELPPLEINSRVSLKVGETIESGTVIFCDVLPGKESLGYFVGVDMDNPIGNWDGRFDGVQLCSFACVESTILLHINDIIPALSESVTQERRPPKLAFMSRGVGDKGSSSHNKPKATGSTSDPGNRNRSELFYTLNGSSVDSQPQSKSKNTWYIDEVAEDPAKSLTEISTDFDRSSPPLQPPPVNSLTTENRFHSLPFSLTKMPNTNGSIGHSPLSLSAQSVMEELNTAPVQESPPLAMPPGNSHGLEVGSLAEVKENPPFYGVIRWIGQPPGLNEVLAGLELEDECAGCTDGTFRGTRYFTCALKKALFVKLKSCRPDSRFASLQPVSNQIERCNSLAFGGYLSEVVEENTPPKMEKEGLEIMIGKKKGIQGHYNSCYLDSTLFCLFAFSSVLDTVLLRPKEKNDVEYYSETQELLRTEIVNPLRIYGYVCATKIMKLRKILEKVEAASGFTSEEKDPEEFLNILFHHILRVEPLLKIRSAGQKVQDCYFYQIFMEKNEKVGVPTIQQLLEWSFINSNLKFAEAPSCLIIQMPRFGKDFKLFKKIFPSLELNITDLLEDTPRQCRICGGLAMYECRECYDDPDISAGKIKQFCKTCNTQVHLHPKRLNHKYNPVSLPKDLPDWDWRHGCIPCQNMELFAVLCIETSHYVAFVKYGKDDSAWLFFDSMADRDGGQNGFNIPQVTPCPEVGEYLKMSLEDLHSLDSRRIQGCARRLLCDAYMCMYQSPTMSLYK

SEQ ID NO: 69 - protein, 823 aa, Homo sapiens
MGKKRTKGKTVPIDDSSETLEPVCRHIRKGLEQGNLKKALVNVEWNICQDCKTDNKVKDKAEEETEEKPSVWLCLKCGHQGCGRNSQEQHALKHYLTPRSEPHCLVLSLDNWSVWCYVCDNEVQYCSSNQLGQVVDYVRKQASITTPKPAEKDNGNIELENKKLEKESKNEQEREKKENMAKENPPMNSPCQITVKGLSNLGNTCFFNAVMQNLSQTPVLRELLKEVKMSGTIVKIEPPDLALTEPLEINLEPPGPLTLAMSQFLNEMQETKKGVVTPKELFSQVCKKAVRFKGYQQQDSQELLRYLLDGMRAEEHQRVSKGILKAFGNSTEKLDEELKNKVKDYEKKKSMPSFVDRIFGGELTSMIMCDQCRTVSLVHESFLDLSLPVLDDQSGKKSVNDKNLKKTVEDEDQDSEEEKDNDSYIKERSDIPSGTSKHLQKKAKKQAKKQAKNQRRQQKIQGKVLHLNDICTIDHPEDSEYEAEMSLQGEVNIKSNHISQEGVMHKEYCVNQKDLNGQAKMIESVTDNQKSTEEVDMKNINMDNDLEVLTSSPTRNLNGAYLTEGSNGEVDISNGFKNLNLNAALHPDEINIEILNDSHTPGTKVYEVVNEDPETAFCTLANREVFNTDECSIQHCLYQFTRNEKLRDANKLLCEVCTRRQCNGPKANIKGERKHVYTNAKKQMLISLAPPVLTLHLKRFQQAGFNLRKVNKHIKFPEILDLAPFCTLKCKNVAEENTRVLYSLYGVVEHSGTMRSGHYTAYAKARTANSHLSNLVLHGDIPQDFEMESKGQWFHISDTHVQAVPTTKVLNSQAYLLFYERIL

SEQ ID NO: 70 - protein, 1137 aa, Homo sapiens
MKCVFVTVGTTSFDDLIACVSAPDSLQKIESLGYNRLILQIGRGTVVPEPFSTESFTLDVYRYKDSLKEDIQKADLVISHAGAGSCLETLEKGKPLVVVINEKLMNNHQLELAKQLHKEGHLFYCTCRVLTCPGQAKSIASAPGKCQDSAALTSTAFSGLDFGLLSGYLHKQALVTATHPTCTLLFPSCHAFFPLPLTPTLYKMHKGWKNYCSQKSLNEASMDEYLGSLGLFRKLTAKDASCLFRAISEQLFCSQVHHLEIRKACVSYMRENQQTFESYVEGSFEKYLERLGDPKESAGQLEIRALSLIYNRDFILYRFPGKPPTYVTDNGYEDKILLCYSSSGHYDSVYSKQFQSSAAVCQAVLYEILYKDVFVVDEEELKTAIKLFRSGSKKNRNNAVTGSEDAHTDYKSSNQNRMEEWGACYNAENIPEGYNKGTEETKSPENPSKMPFPYKVLKALDPEIYRNVEFDVWLDSRKELQKSDYMEYAGRQYYLGDKCQVCLESEGRYYNAHIQEVGNENNSVTVFIEELAEKHVVPLANLKPVTQVMSVPAWNAMPSRKGRGYQKMPGGYVPEIVISEMDIKQQKKMFKKIRGKEVYMTMAYGKGDPLLPPRLQHSMHYGHDPPMHYSQTAGNVMSNEHFHPQHPSPRQGRGYGMPRNSSRFINRHNMPGPKVDFYPGPGKRCCQSYDNFSYRSRSFRRSHRQMSCVNKESQYGFTPGNGQMPRGLEETITFYEVEEGDETAYPTLPNHGGPSTMVPATSGYCVGRRGHSSGKQTLNLEEGNGQSENGRYHEEYLYRAEPDYETSGVYSTTASTANLSLQDRKSCSMSPQDTVTSYNYPQKMMGNIAAVAASCANNVPAPVLSNGAAANQAISTTSVSSQNAIQPLFVSPPTHGRPVIASPSYPCHSAIPHAGASLPPPPPPPPPPPPPPPPPPPPPPPPPPPALDVGETSNLQPPPPLPPPPYSCDPSGSDLPQDTKVLQYYFNLGLQCYYHSYWHSMVYVPQMQQQLHVENYPVYTEPPLVDQTVPQCYSEVRREDGIQAEASANDTFPNADSSSVPHGAVYYPVMSDPYGQPPLPGFDSCLPVVPDYSCVPPWHPVGTAYGGSSQIHGAINPGPIGCIAPSPPASHYVPQGM

SEQ ID NO: 71 - protein, 348 aa, Homo sapiens
MFGPAKGRHFGVHPAPGFPGGVSQQAAGTKAGPAGAWPVGSRTDTMWRLRCKAKDGTHVLQGLSSRTRVRELQGQIAAITGIAPGGQRILVGYPPECLDLSNGDTILEDLPIQSGDMLIIEEDQTRPRSSPAFTKRGASSYVRETLPVLTRTVVPADNSCLFTSVYYVVEGGVLNPACAPEMRRLIAQIVASDPDFYSEAILGKTNQEYCDWIKRDDTWGGAIEISILSKFYQCEICVVDTQTVRIDRFGEDAGYTKRVLLIYDGIHYDPLQRNFPDPDTPPLTIFSSNDDIVLVQALELADEARRRRQFTDVNRFTLRCMVCQKGLTGQAEAREHAKETGHTNFGEV

SEQ ID NO: 72 - protein, 481 aa, Homo sapiens
MQLYSSVCTHYPAGAPGPTAAAPAPPAAATPFKVSLQPPGAAGAAPEPETGECQPAAAAEHREAAAVPAAKMPAFSSCFEVVSGAAAPASAAAGPPGASCKPPLPPHYTSTAQITVRALGADRLLLHGPDPVPGAAGSAAAPRGRCLLLAPAPAAPVPPRRGSSAWLLEELLRPDCPEPAGLDATREGPDRNFRLSEHRQALAAAKHRGPAATPGSPDPGPGPWGEEHLAERGPRGWERGGDRCDAPGGDAARRPDPEAEAPPAGSIEAAPSSAAEPVIVSRSDPRDEKLALYLAEVEKQDKYLRQRNKYRFHIIPDGNCLYRAVSKTVYGDQSLHRELREQTVHYIADHLDHFSPLIEGDVGEFIIAAAQDGAWAGYPELLAMGQMLNVNIHLTTGGRLESPTVSTMIHYLGPEDSLRPSIWLSWLSNGHYDAVFDHSYPNPEYDNWCKQTQVQRKRDEELAKSMAISLSKMYIEQNACS

SEQ ID NO: 73 - protein, 293 aa, Homo sapiens
MEAVLTEELDEEEQLLRRHRKEKKELQAKIQGMKNAVPKNDKKRRKQLTEDVAKLEKEMEQKHREELEQLKLTTKENKIDSVAVNISNLVLENQPPRISKAQKRREKKAALEKEREERIAEAEIENLTGARHMESEKLAQILAARQLEIKQIPSDGHCMYKAIEDQLKEKDCALTVVALRSQTAEYMQSHVEDFLPFLTNPNTGDMYTPEEFQKYCEDIVNTAAWGGQLELRALSHILQTPIEIIQADSPPIIVGEEYSKKPLILVYMRHAYGLGEHYNSVTRLVNIVTENCS

SEQ ID NO: 74 - protein, 288 aa, Homo sapiens
MDDPKSEQQRILRRHQRERQELQAQIRSLKNSVPKTDKTKRKQLLQDVARMEAEMAQKHRQELEKFQDDSSIESVVEDLAKMNLENRPPRSSKAHRKRERMESEERERQESIFQAEMSEHLAGFKREEEEKLAAILGARGLEMKAIPADGHCMYRAIQDQLVFSVSVEMLRCRTASYMKKHVDEFLPFFSNPETSDSFGYDDFMIYCDNIVRTTAWGGQLELRALSHVLKTPIEVIQADSPTLIIGEEYVKKPIILVYLRYAYSLGEHYNSVTPLEAGAAGGVLPRLL

SEQ ID NO: 75 - protein, 271 aa, Homo sapiens
MAAEEPQQQKQEPLGSDSEGVNCLAYDEAIMAQQDRIQQEIAVQNPLVSERLELSVLYKEYAEDDNIYQQKIKDLHKKYSYIRKTRPDGNCFYRAFGFSHLEALLDDSKELQRFKAVSAKSKEDLVSQGFTEFTIEDFHNTFMDLIEQVEKQTSVADLLASFNDQSTSDYLVVYLRLLTSGYLQRESKFFEHFIEGGRTVKEFCQQEVEPMCKESDHIHIIALAQALSVSIQVEYMDRGEGGTTNPHIFPEGSEPKVYLLYRPGHYDILYK

SEQ ID NO: 76 - protein, 926 aa, Homo sapiens
MVSSVLPNPTSAECWAALLHDPMTLDMDAVLSDFVRSTGAEPGLARDLLEGKNWDLTAALSDYEQLRQVHTANLPHVFNEGRGPKQPEREPQPGHKVERPCLQRQDDIAQEKRLSRGISHASSAIVSLARSHVASECNNEQFPLEMPIYTFQLPDLSVYSEDFRSFIERDLIEQATMVALEQAGRLNWWSTVCTSCKRLLPLATTGDGNCLLHAASLGMWGFHDRDLVLRKALYTMMRTGAEREALKRRWRWQQTQQNKEEEWEREWTELLKLASSEPRTHFSKNGGTGGGVDNSEDPVYESLEEFHVFVLAHILRRPIVVVADTMLRDSGGEAFAPIPFGGIYLPLEVPPNRCHCSPLVLAYDQAHFSALVSMEQRDQQREQAVIPLTDSEHKLLPLHFAVDPGKDWEWGKDDNDNARLAHLILSLEAKLNLLHSYMNVTWIRIPSETRAPLAQPESPTASAGEDVQSLADSLDSDRDSVCSNSNSNNGKNGKDKEKEKQRKEKDKTRADSVANKLGSFSKTLGIKLKKNMGGLGGLVHGKMGRANSANGKNGDSAERGKEKKAKSRKGSKEESGASASTSPSEKTTPSPTDKAAGASPAEKGGGPRGDAWKYSTDVKLSLNILRAAMQGERKFIFAGLLLTSHRHQFHEEMIGYYLTSAQERFSAEQEQRRRDAATAAAAAAAAAAATAKRPPRRPETEGVPVPERASPGPPTQLVLKLKERPSPGPAAGRAARAAAGGTASPGGGARRASASGPVPGRSPPAPARQSVIHVQASGARDEACAPAVGALRPCATYPQQNRSLSSQSYSPARAAALRTVNTVESLARAVPGALPGAAGTAGAAEHKSQTYTNGFGALRDGLEFADADAPTARSNGECGRGGPGPVQRRCQRENCAFYGRAETEHYCSYCYREELRRRREARGARP

SEQ ID NO: 77 - protein, 1113 aa, Homo sapiens
MEAAVGVPDGGDQGGAGPREDATPMDAYLRKLGLYRKLVAKDGSCLFRAVAEQVLHSQSRHVEVRMACIHYLRENREKFEAFIEGSFEEYLKRLENPQEWVGQVEISALSLMYRKDFIIYREPNVSPSQVTENNFPEKVLLCFSNGNHYDIVYPIKYKESSAMCQSLLYELLYEKVFKTDVSKIVMELDTLEVADEDNSEISDSEDDSCKSKTAAAAADVNGFKPLSGNEQLKNNGNSTSLPLSRKVLKSLNPAVYRNVEYEIWLKSKQAQQKRDYSIAAGLQYEVGDKCQVRLDHNGKFLNADVQGIHSENGPVLVEELGKKHTSKNLKAPPPESWNTVSGKKMKKPSTSGQNFHSDVDYRGPKNPSKPIKAPSALPPRLQHPSGVRQHAFSSHSSGSQSQKFSSEHKNLSRTPSQIIRKPDRERVEDFDHTSRESNYFGLSPEERREKQAIEESRLLYEIQNRDEQAFPALSSSSVNQSASQSSNPCVQRKSSHVGDRKGSRRRMDTEERKDKDSIHGHSQLDKRPEPSTLENITDDKYATVSSPSKSKKLECPSPAEQKPAEHVSLSNPAPLLVSPEVHLTPAVPSLPATVPAWPSEPTTFGPTGVPAPIPVLSVTQTLTTGPDSAVSQAHLTPSPVPVSIQAVNQPLMPLPQTLSLYQDPLYPGFPCNEKGDRAIVPPYSLCQTGEDLPKDKNILRFFFNLGVKAYSCPMWAPHSYLYPLHQAYLAACRMYPKVPVPVYPHNPWFQEAPAAQNESDCTCTDAHFPMQTEASVNGQMPQPEIGPPTFSSPLVIPPSQVSESHGQLSYQADLESETPGQLLHADYEESLSGKNMFPQSFGPNPFLGPVPIAPPFFPHVWYGYPFQGFIENPVMRQNIVLPSDEKGELDLSLENLDLSKDCGSVSTVDEFPEARGEHVHSLPEASVSSKPDEGRTEQSSQTRKADTALASIPPVAEGKAHPPTQILNRERETVPVELEPKRTIQSLKEKTEKVKDPKTAADVVSPGANSVDSRVQRPKEESSEDENEVSNILRSGRSKQFYNQTYGSRKYKSDWGYSGRGGYQHVRSEESWKGQPSRSRDEGYQYHRNVRGRPFRGDRRRSGMGDGHRGQHT

SEQ ID NO: 78 - protein, 234 aa, Homo sapiens
MSETSFNLISEKCDILSILRDHPENRIYRRKIEELSKRFTAIRKTKGDGNCFYRALGYSYLESLLGKSREIFKFKERVLQTPNDLLAAGFEEHKFRNFFNAFYSVVELVEKDGSVSSLLKVFNDQSASDHIVQFLRLLTSAFIRNRADFFRHFIDEEMDIKDFCTHEVEPMATECDHIQITALSQALSIALQVEYVDEMDTALNHHVFPEAATPSVYLLYKTSHYNILYAADKH

SEQ ID NO: 79 - protein, 398 aa, Homo sapiens
MSRKQAAKSRPGSGSRKAEAERKRDERAARRALAKERRNRPESGGGGGCEEEFVSFANQLQALGLKLREVPGDGNCLFRALGDQLEGHSRNHLKHRQETVDYMIKQREDFEPFVEDDIPFEKHVASLAKPGTFAGNDAIVAFARNHQLNVVIHQLNAPLWQIRGTEKSSVRELHIAYRYGEHYDSVRRINDNSEAPAHLQTDFQMLHQDESNKREKIKTKGMDSEDDLRDEVEDAVQKVCNATGCSDFNLIVQNLEAENYNIESAIIAVLRMNQGKRNNAEENLEPSGRVLKQCGPLWEEGGSGARIFGNQGLNEGRTENNKAQASPSEENKANKNQLAKVTNKQRREQQWMEKKKRQEERHRHKALESRGSHRDNNRSEAEANTQVTLVKTFAALNI

SEQ ID NO: 80 - protein, 843 aa, Homo sapiens
MTLDMDAVLSDFVRSTGAEPGLARDLLEGKNWDVNAALSDFEQLRQVHAGNLPPSFSEGSGGSRTPEKGFSDREPTRPPRPILQRQDDIVQEKRLSRGISHASSSIVSLARSHVSSNGGGGGSNEHPLEMPICAFQLPDLTVYNEDFRSFIERDLIEQSMLVALEQAGRLNWWVSVDPTSQRLLPLATTGDGNCLLHAASLGMWGFHDRDLMLRKALYALMEKGVEKEALKRRWRWQQTQQNKESGLVYTEDEWQKEWNELIKLASSEPRMHLGTNGANCGGVESSEEPVYESLEEFHVFVLAHVLRRPIVVVADTMLRDSGGEAFAPIPFGGIYLPLEVPASQCHRSPLVLAYDQAHFSALVSMEQKENTKEQAVIPLTDSEYKLLPLHFAVDPGKGWEWGKDDSDNVRLASVILSLEVKLHLLHSYMNVKWIPLSSDAQAPLAQPESPTASAGDEPRSTPESGDSDKESVGSSSTSNEGGRRKEKSKRDREKDKKRADSVANKLGSFGKTLGSKLKKNMGGLMHSKGSKPGGVGTGLGGSSGTETLEKKKKNSLKSWKGGKEEAAGDGPVSEKPPAESVGNGGSKYSQEVMQSLSILRTAMQGEGKFIFVGTLKMGHRHQYQEEMIQRYLSDAEERFLAEQKQKEAERKIMNGGIGGGPPPAKKPEPDAREEQPTGPPAESRAMAFSTGYPGDFTIPRPSGGGVHCQEPRRQLAGGPCVGGLPPYATFPRQCPPGRPYPHQDSIPSLEPGSHSKDGLHRGALLPPPYRVADSYSNGYREPPEPDGWAGGLRGLPPTQTKCKQPNCSFYGHPETNNFCSCCYREELRRREREPDGELLVHRF

SEQ ID NO: 81 - protein, 571 aa, Homo sapiens
MTILPKKKPPPPDADPANEPPPPGPMPPAPRRGGGVGVGGGGTGVGGGDRDRDSGVVGARPRASPPPQGPLPGPPGALHRWALAVPPGAVAGPRPQQASPPPCGGPGGPGGGPGDALGAAAAGVGAAGVVVGVGGAVGVGGCCSGPGHSKRRRQAPGVGAVGGGSPEREEVGAGYNSEDEYEAAAARIEAMDPATVEQQEHWFEKALRDKKGFIIKQMKEDGACLFRAVADQVYGDQDMHEVVRKHCMDYLMKNADYFSNYVTEDFTTYINRKRKNNCHGNHIEMQAMAEMYNRPVEVYQYSTGTSAVEPINTFHGIHQNEDEPIRVSYHRNIHYNSVVNPNKATIGVGLGLPSFKPGFAEQSLMKNAIKTSEESWIEQQMLEDKKRATDWEATNEAIEEQVARESYLQWLRDQEKQARQVRGPSQPRKASATCSSATAAASSGLEEWTSRSPRQRSSASSPEHPELHAELGMKPPSPGTVLALAKPPSPCAPGTSSQFSAGADRATSPLVSLYPALECRALIQQMSPSAFGLNDWDDDEILASVLAVSQQEYLDSMKKNKVHRDPPPDKS

SEQ ID NO: 82 - protein, 790 aa, Homo sapiens
MAEQVLPQALYLSNMRKAVKIRERTPEDIFKPTNGIIHHFKTMHRYTLEMFRTCQFCPQFREIIHKALIDRNIQATLESQKKLNWCREVRKLVALKTNGDGNCLMHATSQYMWGVQDTDLVLRKALFSTLKETDTRNFKFRWQLESLKSQEFVETGLCYDTRNWNDEWDNLIKMASTDTPMARSGLQYNSLEEIHIFVLCNILRRPIIVISDKMLRSLESGSNFAPLKVGGIYLPLHWPAQECYRYPIVLGYDSHHFVPLVTLKDSGPEIRAVPLVNRDRGRFEDLKVHFLTDPENEMKEKLLKEYLMVIEIPVQGWDHGTTHLINAAKLDEANLPKEINLVDDYFELVQHEYKKWQENSEQGRREGHAQNPMEPSVPQLSLMDVKCETPNCPFFMSVNTQPLCHECSERRQKNQNKLPKLNSKPGPEGLPGMALGASRGEAYEPLAWNPEESTGGPHSAPPTAPSPFLFSETTAMKCRSPGCPFTLNVQHNGFCERCHNARQLHASHAPDHTRHLDPGKCQACLQDVTRTFNGICSTCFKRTTAEASSSLSTSLPPSCHQRSKSDPSRLVRSPSPHSCHRAGNDAPAGCLSQAARTPGDRTGTSKCRKAGCVYFGTPENKGFCTLCFIEYRENKHFAAASGKVSPTASRFQNTIPCLGRECGTLGSTMFEGYCQKCFIEAQNQRFHEAKRTEEQLRSSQRRDVPRTTQSTSRPKCARASCKNILACRSEELCMECQHPNQRMGPGAHRGEPAPEDPPKQRCRAPACDHFGNAKCNGYCNECFQFKQMYG

SEQ ID NO: 83 - protein, 708 aa, Homo sapiens
MSERGIKWACEYCTYENWPSAIKCTMCRAQRPSGTIITEDPFKSGSSDVGRDWDPSSTEGGSSPLICPDSSARPRVKSSYSMENANKWSCHMCTYLNWPRAIRCTQCLSQRRTRSPTESPQSSGSGSRPVAFSVDPCEEYNDRNKLNTRTQHWTCSVCTYENWAKAKRCVVCDHPRPNNIEAIELAETEEASSIINEQDRARWRGSCSSGNSQRRSPPATKRDSEVKMDFQRIELAGAVGSKEELEVDFKKLKQIKNRMKKTDWLFLNACVGVVEGDLAAIEAYKSSGGDIARQLTADEVRLLNRPSAFDVGYTLVHLAIRFQRQDMLAILLTEVSQQAAKCIPAMVCPELTEQIRREIAASLHQRKGDFACYFLTDLVTFTLPADIEDLPPTVQEKLFDEVLDRDVQKELEEESPIINWSLELATRLDSRLYALWNRTAGDCLLDSVLQATWGIYDKDSVLRKALHDSLHDCSHWFYTRWKDWESWYSQSFGLHFSLREEQWQEDWAFILSLASQPGASLEQTHIFVLAHILRRPIIVYGVKYYKSFRGETLGYTRFQGVYLPLLWEQSFCWKSPIALGYTRGHFSALVAMENDGYGNRGAGANLNTDDDVTITFLPLVDSERKLLHVHFLSAQELGNEEQQEKLLREWLDCCVTEGGVLVAMQKSSRRRNHPLVTQMVEKWLDRYRQIRPCTSLSDGEEDEDDEDE

SEQ ID NO: 84 - protein, 1222 aa, Homo sapiens
MSQPPPPPPPLPPPPPPPEAPQTPSSLASAAASGGLLKRRDRRILSGSCPDPKCQARLFFPASGSVSIECTECGQRHEQQQLLGVEEVTDPDVVLHNLLRNALLGVTGAPKKNTELVKVMGLSNYHCKLLSPILARYGMDKQTGRAKLLRDMNQGELFDCALLGDRAFLIEPEHVNTVGYGKDRSGSLLYLHDTLEDIKRANKSQECLIPVHVDGDGHCLVHAVSRALVGRELFWHALRENLKQHFQQHLARYQALFHDFIDAAEWEDIINECDPLFVPPEGVPLGLRNIHIFGLANVLHRPIILLDSLSGMRSSGDYSATFLPGLIPAEKCTGKDGHLNKPICIAWSSSGRNHYIPLVGIKGAALPKLPMNLLPKAWGVPQDLIKKYIKLEEDGGCVIGGDRSLQDKYLLRLVAAMEEVFMDKHGIHPSLVADVHQYFYRRTGVIGVQPEEVTAAAKKAVMDNRLHKCLLCGALSELHVPPEWLAPGGKLYNLAKSTHGQLRTDKNYSFPLNNLVCSYDSVKDVLVPDYGMSNLTACNWCHGTSVRKVRGDGSIVYLDGDRTNSRSTGGKCGCGFKHFWDGKEYDNLPEAFPITLEWGGRVVRETVYWFQYESDSSLNSNVYDVAMKLVTKHFPGEFGSEILVQKVVHTILHQTAKKNPDDYTPVNIDGAHAQRVGDVQGQESESQLPTKIILTGQKTKTLHKEELNMSKTERTIQQNITEQASVMQKRKTEKLKQEQKGQPRTVSPSTIRDGPSSAPATPTKAPYSPTTSKEKKIRITTNDGRQSMVTLKSSTTFFELQESIAREFNIPPYLQCIRYGFPPKELMPPQAGMEKEPVPLQHGDRITIEILKSKAEGGQSAAAHSAHTVKQEDIAVTGKLSSKELQEQAEKEMYSLCLLATLMGEDVWSYAKGLPHMFQQGGVFYSIMKKTMGMADGKHCTFPHLPGKTFVYNASEDRLELCVDAAGHFPIGPDVEDLVKEAVSQVRAEATTRSRESSPSHGLLKLGSGGVVKKKSEQLHNVTAFQGKGHSLGTASGNPHLDPRARETSVVRKHNTGTDFSNSSTKTEPSVFTASSSNSELIRIAPGVVTMRDGRQLDPDLVEAQRKKLQEMVSSIQASMDRHLRDQSTEQSPSDLPQRKTEVVSSSAKSGSLQTGLPESFPLTGGTENLNTETTDGCVADALGAAFATRSKAQRGNSVEELEEMDSQDAEMTNTTEPMDHS

SEQ ID NO: 85 - protein, 230 aa, Homo sapiens
MEGQRWLPLEANPEVTNQFLKQLGLHPNWQFVDVYGMDPELLSMVPRPVCAVLLLFPITEKYEVFRTEEEEKIKSQGQDVTSSVYFMKQTISNACGTIGLIHAIANNKDKMHFESGSTLKKFLEESVSMSPEERARYLENYDAIRVTHETSAHEGQTEAPSIDEKVDLHFIALVHVDGHLYELDGRKPFPINHGETSDETLLEDAIEVCKKFMERDPDELRFNAIALSAA

SEQ ID NO: 86 - protein, 223 aa, Homo sapiens [sequence omitted]

SEQ ID NO: 87 - protein, 329 aa, Homo sapiens
MTGNAGEWCLMESDPGVFTELIKGFGCRGAQVEEIWSLEPENFEKLKPVHGLIFLFKWQPGEEPAGSVVQDSRLDTIFFAKQVINNACATQAIVSVLLNCTHQDVHLGETLSEFKEFSQSFDAAMKGLALSNSDVIRQVHNSFARQQMFEFDTKTSAKEEDAFHFVSYVPVNGRLYELDGLREGPIDLGACNQDDWISAVRPVIEKRIQKYSEGEIRFNLMAIVSDRKMIYEQKIAELQRQLAEEEPMDTDQGNSMLSAIQSEVAKNQMLIEEEVQKLKRYKIENIRRKHNYLPFIMELLKTLAEHQQLIPLVEKAKEKQNAKKAQETK

SEQ ID NO: 88 - protein, 361 aa, Homo sapiens
MESIFHEKQEGSLCAQHCLNNLLQGEYFSPVELSSIAHQLDEEERMRMAEGGVTSEDYRTFLQQPSGNMDDSGFFSIQVISNALKVWGLELILFNSPEYQRLRIDPINERSFICNYKEHWFTVRKLGKQWFNLNSLLTGPELISDTYLALFLAQLQQEGYSIFVVKGDLPDCEADQLLQMIRVQQMHRPKLIGEELAQLKEQRVHKTDLERVLEANDGSGMLDEDEEDLQRALALSRQEIDMEDEEADLRRAIQLSMQGSSRNISQDMTQTSGTNLTSEELRKRREAYFEKQQQKQQQQQQQQQQGDLSGQSSHPCERPATSSGALGSDLGDAMSEEDMLQAAVTMSLETVRNDLKTEGKK

SEQ ID NO: 89 - protein, 188 aa, Homo sapiens
MSQAPGAQPSPPTVYHERQRLELCAVHALNNVLQQQLFSQEAADEICKRLAPDSRLNPHRSLLGTGNYDVNVIMAALQGLGLAAVWWDRRRPLSQLALPQVLGLILNLPSPVSLGLLSLPLRRRHWVALRQVDGVYYNLDSKLRAPEALGDEDGVRAFLAAALAQGLCEVLLVVTKEVEEKGSWLRTD

SEQ ID NO: 90 - protein, 202 aa, Homo sapiens
MSCVPWKGDKAKSESLELPQAAPPQIYHEKQRRELCALHALNNVFQDSNAFTRDTLQEIFQRLSPNTMVTPHKKSMLGNGNYDVNVIMAALQTKGYEAVWWDKRRDVGVIALTNVMGFIMNLPSSLCWGPLKLPLKRQHWICVREVGGAYYNLDSKLKMPEWIGGESELRKFLKHHLRGKNCELLLVVPEEVEAHQSWRTDV

SEQ ID NO: 91 - protein, 355 aa, Homo sapiens
MDFIFHEKQEGFLCAQHCLNNLLQGEYFSPVELASIAHQLDEEERMRMAEGGVTSEEYLAFLQQPSENMDDTGFFSIQVISNALKFWGLEIIHFNNPEYQKLGIDPINERSFICNYKQHWFTIRKFGKHWFNLNSLLAGPELISDTCLANFLARLQQQAYSVFVVKGDLPDCEADQLLQIISVEEMDTPKLNGKKLVKQKEHRVYKTVLEKVSEESDESGTSDQDEEDFQRALELSRQETNREDEHLRSTIELSMQGSSGNTSQDLPKTSCVTPASEQPKKIKEDYFEKHQQEQKQQQQQSDLPGHSSYLHERPTTSSRAIESDLSDDISEGTVQAAVDTILEIMRKNLKIKGEK

SEQ ID NO: 92 - protein, 445 aa, Homo sapiens
MSELTKELMELVWGTKSSPGLSDTIFCRWTQGFVFSESEGSALEQFEGGPCAVIAPVQAFLLKKLLFSSEKSSWRDCSEEEQKELLCHTLCDILESACCDHSGSYCLVSWLRGKTTEETASISGSPAESSCQVEHSSALAVEELGFERFHALIQKRSFRSLPELKDAVLDQYSMWGNKFGVLLFLYSVLLTKGIENIKNEIEDASEPLIDPVYGHGSQSLINLLLTGHAVSNVWDGDRECSGMKLLGIHEQAAVGFLTLMEALRYCKVGSYLKSPKFPIWIVGSETHLTVFFAKDMALVAPEAPSEQARRVFQTYDPEDNGFIPDSLLEDVMKALDLVSDPEYINLMKNKLDPEGLGIILLGPFLQEFFPDQGSSGPESFTVYHYNGLKQSNYNEKVMYVEGTAVVMGFEDPMLQTDDTPIKRCLQTKWPYIELLWTTDRSPSLN

SEQ ID NO: 93 - protein, 469 aa, Homo sapiens
MEYHQPEDPAPGKAGTAEAVIPENHEVLAGPDEHPQDTDARDADGEAREREPADQALLPSQCGDNLESPLPEASSAPPGPTLGTLPEVETIRACSMPQELPQSPRTRQPEPDFYCVKWIPWKGEQTPIITQSTNGPCPLLAIMNILFLQWKVKLPPQKEVITSDELMAHLGNCLLSIKPQEKSEGLQLNFQQNVDDAMTVLPKLATGLDVNVRFTGVSDFEYTPECSVFDLLGIPLYHGWLVDPQSPEAVRAVGKLSYNQLVERIITCKHSSDTNLVTEGLIAEQFLETTAAQLTYHGLCELTAAAKEGELSVFFRNNHFSTMTKHKSHLYLLVTDQGFLQEEQVVWESLHNVDGDSCFCDSDFHLSHSLGKGPGAEGGSGSPETQLQVDQDYLIALSLQQQQPRGPLGLTDLELAQQLQQEEYQQQQAAQPVRMRTRVLSLQGRGATSGRPAGERRQRPKHESDCILL

SEQ ID NO: 94 - protein, 621 aa, Homo sapiens
MESSPESLQPLEHGVAAGPASGTGSSQEGLQETRLAAGDGPGVWAAETSGGNGLGAAAARRSLPDSASPAGSPEVPGPCSSSAGLDLKDSGLESPAAAEAPLRGQYKVTASPETAVAGVGHELGTAGDAGARPDLAGTCQAELTAAGSEEPSSAGGLSSSCSDPSPPGESPSLDSLESFSNLHSFPSSCEFNSEEGAENRVPEEEEGAAVLPGAVPLCKEEEGEETAQVLAASKERFPGQSVYHIKWIQWKEENTPIITQNENGPCPLLAILNVLLLAWKVKLPPMMEIITAEQLMEYLGDYMLDAKPKEISEIQRLNYEQNMSDAMAILHKLQTGLDVNVRFTGVRVFEYTPECIVFDLLDIPLYHGWLVDPQIDDIVKAVGNCSYNQLVEKIISCKQSDNSELVSEGFVAEQFLNNTATQLTYHGLCELTSTVQEGELCVFFRNNHFSTMTKYKGQLYLLVTDQGFLTEEKVVWESLHNVDGDGNFCDSEFHLRPPSDPETVYKGQQDQIDQDYLMALSLQQEQQSQEINWEQIPEGISDLELAKKLQEEEDRRASQYYQEQEQAAAAAAAASTQAQQGQPAQASPSSGRQSGNSERKRKEPREKDKEKEKEKNSCVIL

SEQ ID NO: 95 - protein, 757 aa, Homo sapiens
MDSLFVEEVAASLVREFLSRKGLKKTCVTMDQERPRSDLSINNRNDLRKVLHLEFLYKENKAKENPLKTSLELITRYFLDHFGNTANNFTQDTPIPALSVPKKNNKVPSRCSETTLVNIYDLSDEDAGWRTSLSETSKARHDNLDGDVLGNFVSSKRPPHKSKPMQTVPGETPVLTSAWEKIDKLHSEPSLDVKRMGENSRPKSGLIVRGMMSGPIASSPQDSFHRHYLRRSSPSSSSTQPQEESRKVPELFVCTQQDILASSNSSPSRTSLGQLSELTVERQKTTASSPPHLPSKRLPPWDRARPRDPSEDTPAVDGSTDTDRMPLKLYLPGGNSRMTQERLERAFKRQGSQPAPVRKNQLLPSDKVDGELGALRLEDVEDELIREEVILSPVPSVLKLQTASKPIDLSVAKEIKTLLFGSSFCCFNEEWKLQSFSFSNTASLKYGIVQNKGGPCGVLAAVQGCVLQKLLFEGDSKADCAQGLQPSDAHRTRCLVLALADIVWRAGGRERAVVALASRTQQFSPTGKYKADGVLETLTLHSLTCYEDLVTFLQQSIHQFEVGPYGCILLTLSAILSRSTELIRQDFDVPTSHLIGAHGYCTQELVNLLLTGKAVSNVFNDVVELDSGDGNITLLRGIAARSDIGFLSLFEHYNMCQVGCFLKTPRFPIWVVCSESHFSILFSLQPGLLRDWRTERLFDLYYYDGLANQQEQIRLTIDTTQTISEDTDNDLVPPLELCIRTKWKGASVNWNGSDPIL

SEQ ID NO: 96 - protein, 424 aa, Homo sapiens
MSDHGDVSLPPEDRVRALSQLGSAVEVNEDIPPRRYFRSGVEIIRMASIYSEEGNIEHAFILYNKYITLFIEKLPKHRDYKSAVIPEKKDTVKKLKEIAFPKAEELKAELLKRYTKEYTEYNEEKKKEAEELARNMAIQQELEKEKQRVAQQKQQQLEQEQFHAFEEMIRNQELEKERLKIVQEFGKVDPGLGGPLVPDLEKPSLDVFPTLTVSSIQPSDCHTTVRPAKPPVVDRSLKPGALSNSESIPTIDGLRHVVVPGRLCPQFLQLASANTARGVETCGILCGKLMRNEFTITHVLIPKQSAGSDYCNTENEEELFLIQDQQGLITLGWIHTHPTQTAFLSSVDLHTHCSYQMMLPESVAIVCSPKFQETGFFKLTDHGLEEISSCRQKGFHPHSKDPPLFCSCSHVTVVDRAVTITDLR

SEQ ID NO: 97 - protein, 471 aa, Homo sapiens
MAAPEPLSPAGGAGEEAPEEDEDEAEAEDPERPNAGAGGGRSGGGGSSVSGGGGGGGAGAGGCGGPGGALTRRAVTLRVLLKDALLEPGAGVLSIYYLGKKFLGDLQPDGRIMWQETGQTFNSPSAWATHCKKLVNPAKKSGCGWASVKYKGQKLDKYKATWLRLHQLHTPATAADESPASEGEEEELLMEEEEEDVLAGVSAEDKSRRPLGKSPSEPAHPEATTPGKRVDSKIRVPVRYCMLGSRDLARNPHTLVEVTSFAAINKFQPFNVAVSSNVLFLLDFHSHLTRSEVVGYLGGRWDVNSQMLTVLRAFPCRSRLGDAETAAAIEEEIYQSLFLRGLSLVGWYHSHPHSPALPSLQDIDAQMDYQLRLQGSSNGFQPCLALLCSPYYSGNPGPESKISPFWVMPPPEMLLVEFYKGSPDLVRLQEPWSQEHTYLDKLKISLASRTPKDQSLCHVLEQVCGVLKQGS

SEQ ID NO: 98 - protein, 208 aa, Homo sapiens
MGEVEISALAYVKMCLHAARYPHAAVNGLFLAPAPRSGECLCLTDCVPLFHSHLALSVMLEVALNQVDVWGAQAGLVVAGYYHANAAVNDQSPGPLALKIAGRIAEFFPDAVLIMLDNQKLVPQPRVPPVIVLENQGLRWVPKDKNLVMWRDWEESRQMVGALLEDRAHQHLVDFDCHLDDIRQDWTNQRLNTQITQWVGPTNGNGNA

SEQ ID NO: 99 - protein, 310 aa, Homo sapiens
MDRLLRLGGGMPGLGQGPPTDAPAVDTAEQVYISSLALLKMLKHGRAGVPMEVMGLMLGEFVDDYTVRVIDVFAMPQSGTGVSVEAVDPVFQAKMLDMLKQTGRPEMVVGWYHSHPGFGCWLSGVDINTQQSFEALSERAVAVVVDPIQSVKGKVVIDAFRLINANMMVLGHEPRQTTSNLGHLNKPSIQALIHGLNRHYYSITINYRKNELEQKMLLNLHKKSWMEGLTLQDYSEHCKHNESVVKEMLELAKNYNKAVEEEDKMTPEQLAIKNVGKQDPKRHLEEHVDVLMTSNIVQCLAAMLDTVVFK

SEQ ID NO: 100 - protein, 828 aa, Homo sapiens
MAAEEADVDIEGDVVAAAGAQPGSGENTASVLQKDHYLDSSWRTENGLIPWTLDNTISEENRAVIEKMLLEEEYYLSKKSQPEKVWLDQKEDDKKYMKSLQKTAKIMVHSPTKPASYSVKWTIEEKELFEQGLAKFGRRWTKISKLIGSRTVLQVKSYARQYFKNKVKCGLDKETPNQKTGHNLQVKNEDKGTKAWTPSCLRGRADPNLNAVKIEKLSDDEEVDITDEVDELSSQTPQKNSSSDLLLDFPNSKMHETNQGEFITSDSQEALFSKSSRGCLQNEKQDETLSSSEITLWTEKQSNGDKKSIELNDQKFNELIKNCNKHDGRGIIVDARQLPSPEPCEIQKNLNDNEMLFHSCQMVEESHEEEELKPPEQEIEIDRNIIQEEEKQAIPEFFEGRQAKTPERYLKIRNYILDQWEICKPKYLNKTSVRPGLKNCGDVNCIGRIHTYLELIGAINFGCEQAVYNRPQTVDKVRIRDRKDAVEAYQLAQRLQSMRTRRRRVRDPWGNWCDAKDLEGQTFEHLSAEELAKRREEEKGRPVKSLKVPRPTKSSFDPFQLIPCNFFSEEKQEPFQVKVASEALLIMDLHAHVSMAEVIGLLGGRYSEVDKVVEVCAAEPCNSLSTGLQCEMDPVSQTQASETLAVRGFSVIGWYHSHPAFDPNPSLRDIDTQAKYQSYFSRGGAKFIGMIVSPYNRNNPLPYSQITCLVISEEISPDGSYRLPYKFEVQQMLEEPQWGLVFEKTRWIIEKYRLSHSSVPMDKIFRRDSDLTCLQKLLECMRKTLSKVTNCFMAEEFLTEIENLFLSNYKSNQENGVTEENCTKELLM

SEQ ID NO: 101 - protein, 415 aa, Homo sapiens
MAASISGYTFSAVCFHSANSNADHEGFLLGEVRQEETFSISDSQISNTEFLQVIEIHNHQPCSKLFSFYDYASKVNEESLDRILKDRRKKVIGWYRFRRNTQQQMSYREQVLHKQLTRILGVPDLVFLLFSFISTANNSTHALEYVLFRPNRRYNQRISLAIPNLGNTSQQEYKVSSVPNTSQSYAKVIKEHGTDFFDKDGVMKDIRAIYQVYNALQEKVQAVCADVEKSERVVESCQAEVNKLRRQITQRKNEKEQERRLQQAVLSRQMPSESLDPAFSPRMPSSGFAAEGRSTLGDAEASDPPPPYSDFHPNNQESTLSHSRMERSVFMPRPQAVGSSNYASTSAGLKYPGSGADLPPPQRAAGDSGEDSDDSDYENLIDPTEPSNSEYSHSKDSRPMAHPDEDPRNTQTSQI

SEQ ID NO: 102 - protein, 2335 aa, Homo sapiens
MAGVFPYRGPGNPVPGPLAPLPDYMSEEKLQEKARKWQQLQAKRYAEKRKFGFVDAQKEDMPPEHVRKIIRDHGDMTNRKFRHDKRVYLGALKYMPHAVLKLLENMPMPWEQIRDVPVLYHITGAISFVNEIPWVIEPVYISQWGSMWIMMRREKRDRRHFKRMRFPPFDDEEPPLDYADNILDVEPLEAIQLELDPEEDAPVLDWFYDHQPLRDSRKYVNGSTYQRWQFTLPMMSTLYRLANQLLTDLVDDNYFYLFDLKAFFTSKALNMAIPGGPKFEPLVRDINLQDEDWNEFNDINKIIIRQPIRTEYKIAFPYLYNNLPHHVHLTWYHTPNVVFIKTEDPDLPAFYFDPLINPISHRHSVKSQEPLPDDDEEFELPEFVEPFLKDTPLYTDNTANGIALLWAPRPFNLRSGRTRRALDIPLVKNWYREHCPAGQPVKVRVSYQKLLKYYVLNALKHRPPKAQKKRYLFRSFKATKFFQSTKLDWVEVGLQVCRQGYNMLNLLIHRKNLNYLHLDYNFNLKPVKTLTTKERKKSRFGNAFHLCREVLRLTKLVVDSHVQYRLGNVDAFQLADGLQYIFAHVGQLTGMYRYKYKLMRQIRMCKDLKHLIYYRFNTGPVGKGPGCGFWAAGWRVWLFFMRGITPLLERWLGNLLARQFEGRHSKGVAKTVTKQRVESHFDLELRAAVMHDILDMMPEGIKQNKARTILQHLSEAWRCWKANIPWKVPGLPTPIENMILRYVKAKADWWTNTAHYNRERIRRGATVDKTVCKKNLGRLTRLYLKAEQERQHNYLKDGPYITAEEAVAVYTTTVHWLESRRFSPIPFPPLSYKHDTKLLILALERLKEAYSVKSRLNQSQREELGLIEQAYDNPHEALSRIKRHLLTQRAFKEVGIEFMDLYSHLVPVYDVEPLEKITDAYLDQYLWYEADKRRLFPPWIKPADTEPPPLLVYKWCQGINNLQDVWETSEGECNVMLESRFEKMYEKIDLTLLNRLLRLIVDHNIADYMTAKNNVVINYKDMNHTNSYGIIRGLQFASFIVQYYGLVMDLLVLGLHRASEMAGPPQMPNDFLSFQDIATEAAHPIRLFCRYIDRIHIFFRFTADEARDLIQRYLTEHPDPNNENIVGYNNKKCWPRDARMRLMKHDVNLGRAVFWDIKNRLPRSVTTVQWENSFVSVYSKDNPNLLFNMCGFECRILPKCRTSYEEFTHKDGVWNLQNEVTKERTAQCFLRVDDESMQRFHNRVRQILMASGSTTFTKIVNKWNTALIGLMTYFREAVVNTQELLDLLVKCENKIQTRIKIGLNSKMPSRFPPVVFYTPKELGGLGMLSMGHVLIPQSDLRWSKQTDVGITHFRSGMSHEEDQLIPNLYRYIQPWESEFIDSQRVWAEYALKRQEAIAQNRRLTLEDLEDSWDRGIPRINTLFQKDRHTLAYDKGWRVRTDFKQYQVLKQNPFWWTHQRHDGKLWNLNNYRTDMIQALGGVEGILEHTLFKGTYFPTWEGLFWEKASGFEESMKWKKLTNAQRSGLNQIPNRRFTLWWSPTINRANVYVGFQVQLDLTGIFMHGKIPTLKISLIQIFRAHLWQKIHESIVMDLCQVFDQELDALEIETVQKETIHPRKSYKMNSSCADILLFASYKWNVSRPSLLADSKDVMDSTTTQKYWIDIQLRWGDYDSHDIERYARAKFLDYTTDNMSIYPSPTGVLIAIDLAYNLHSAYGNWFPGSKPLIQQAMAKIMKANPALYVLRERIRKGLQLYSSEPTEPYLSSQNYGELFSNQIIWFVDDTNVYRVTIHKTFEGNLTTKPINGAIFIFNPRTGQLFLKIIHTSVWAGQKRLGQLAKWKTAEEVAALIRSLPVEEQPKQIIVTRKGMLDPLEVHLLDFPNIVIKGSELQLPFQACLKVEKFGDLILKATEPQMVLFNLYDDWLKTISSYTAFSRLILILRALHVNNDRAKVILKPDKTTITEPHHIWPTLTDEEWIKVEVQLKDLILADYGKKNNVNVASLTQSEIRDIILGMEISAPSQQRQQIAEIEKQTKEQSQLTATQTRTVNKHGDEIITSTTSNYETQTFSSKTEWRVRAISAANLHLRTNHIYVSSDDIKETGYTYILPKNVLKKFICISDLRAQIAGYLYGVSPPDNPQVKEIRCIVMVPQWGTHQTVHLPGQLPQHEYLKEMEPLGWIHTQPNESPQLSPQDVTTHAKIMADNPSWDGEKTIIITCSFTPGSCTLTAYKLTPSGYEWGRQNTDKGNNPKGYLPSHYERVQMLLSDRFLGFFMVPAQSSWNYNFMGVRHDPNMKYELQLANPKEFYHEVHRPSHFLNFALLQEGEVYSADREDLYA

SEQ ID NO: 103 - protein, 608 aa, Homo sapiens
MAESIIIRVQSPDGVKRITATKRETAATFLKKVAKEFGFQNNGFSVYINRNKTGEITASSNKSLNLLKIKHGDLLFLFPSSLAGPSSEMETSVPPGFKVFGAPNVVEDEIDQYLSKQDGKIYRSRDPQLCRHGPLGKCVHCVPLEPFDEDYLNHLEPPVKHMSFHAYIRKLTGGADKGKFVALENISCKIKSGCEGHLPWPNGICTKCQPSAITLNRQKYRHVDNIMFENHTVADRFLDFWRKTGNQHFGYLYGRYTEHKDIPLGIRAEVAAIYEPPQIGTQNSLELLEDPKAEVVDEIAAKLGLRKVGWIFTDLVSEDTRKGTVRYSRNKDTYFLSSEECITAGDFQNKHPNMCRLSPDGHFGSKFVTAVATGGPDNQVHFEGYQVSNQCMALVRDECLLPCKDAPELGYAKESSSEQYVPDVFYKDVDKFGNEITQLARPLPVEYLIIDITTTFPKDPVYTFSISQNPFPIENRDVLGETQDFHSLATYLSQNTSSVFLDTISDFHLLLFLVTNEVMPLQDSISLLLEAVRTRNEELAQTWKRSEQWATIEQLCSTVGGQLPGLHEYGAVGGSTHTATAAMWACQHCTFMNQPGTGHCEMCSLPRT

SEQ ID NO: 104 - protein, 210 aa, Homo sapiens
MPGVKLTTQAYCKMVLHGAKYPHCAVNGLLVAEKQKPRKEHLPLGGPGAHHTLFVDCIPLFHGTLALAPMLEVALTLIDSWCKDHSYVIAGYYQANERVKDASPNQVAEKVASRIAEGFSDTALIMVDNTKFTMDCVAPTIHVYEHHENRWRCRDPHHDYCEDWPEAQRISASLLDSRSYETLVDFDNHLDDIRNDWTNPEINKAVLHLC

SEQ ID NO: 105 - protein, 409 aa, Homo sapiens
MEGESTSAVLSGFVLGALAFQHLNTDSDTEGFLLGEVKGEAKNSITDSQMDDVEVVYTIDIQKYIPCYQLFSFYNSSGEVNEQALKKILSNVKKNVVGWYKFRRHSDQIMTFRERLLHKNLQEHFSNQDLVFLLLTPSIITESCSTHRLEHSLYKPQKGLFHRVPLVVANLGMSEQLGYKTVSGSCMSTGFSRAVQTHSSKFFEEDGSLKEVHKINEMYASLQEELKSICKKVEDSEQAVDKLVKDVNRLKREIEKRRGAQIQAAREKNIQKDPQENIFLCQALRTFFPNSEFLHSCVMSLKNRHVSKSSCNYNHHLDVVDNLTLMVEHTDIPEASPASTPQIIKHKALDLDDRWQFKRSRLLDTQDKRSKADTGSSNQDKASKMSSPETDEEIEKMKGFGEYSRSPTF

SEQ ID NO: 106 - protein, 436 aa, Homo sapiens
MDQPFTVNSLKKLAAMPDHTDVSLSPEERVRALSKLGCNITISEDITPRRYFRSGVEMERMASVYLEEGNLENAFVLYNKFITLFVEKLPNHRDYQQCAVPEKQDIMKKLKEIAFPRTDELKNDLLKKYNVEYQEYLQSKNKYKAEILKKLEHQRLIEAERKRIAQMRQQQLESEQFLFFEDQLKKQELARGQMRSQQTSGLSEQIDGSALSCFSTHQNNSLLNVFADQPNKSDATNYASHSPPVNRALTPAATLSAVQNLVVEGLRCVVLPEDLCHKFLQLAESNTVRGIETCGILCGKLTHNEFTITHVIVPKQSAGPDYCDMENVEELFNVQDQHDLLTLGWIHTHPTQTAFLSSVDLHTHCSYQLMLPEAIAIVCSPKHKDTGIFRLTNAGMLEVSACKKKGFHPHTKEPRLFSICKHVLVKDIKIIVLDLR

SEQ ID NO: 107 - protein, 327 aa, Homo sapiens
MAAAAAAAAATNGTGGSSGMEVDAAVVPSVMACGVTGSVSVALHPLVILNISDHWIRMRSQEGRPVQVIGALIGKQEGRNIEVMNSFELLSHTVEEKIIIDKEYYYTKEEQFKQVFKELEFLGWYTTGGPPDPSDIHVHKQVCEIIESPLFLKLNPMTKHTDLPVSVFESVIDIINGEATMLFAELTYTLATEEAERIGVDHVARMTATGSGENSTVAEHLIAQHSAIKMLHSRVKLILEYVKASEAGEVPFNHEILREAYALCHCLPVLSTDKFKTDFYDQCNDVGLMAYLGTITKTCNTMNQFVNKFNVLYDRQGIGRRMRGLFF

SEQ ID NO: 108 - protein, 357 aa, Homo sapiens
MATPAVPVSAPPATPTPVPAAAPASVPAPTPAPAAAPVPAAAPASSSDPAAAAAATAAPGQTPASAQAPAQTPAPALPGPALPGPFPGGRVVRLHPVILASIVDSYERRNEGAARVIGTLLGTVDKHSVEVTNCFSVPHNESEDEVAVDMEFAKNMYELHKKVSPNELILGWYATGHDITEHSVLIHEYYSREAPNPIHLTVDTSLQNGRMSIKAYVSTLMGVPGRTMGVMFTPLTVKYAYYDTERIGVDLIMKTCFSPNRVIGLSSDLQQVGGASARIQDALSTVLQYAEDVLSGKVSADNTVGRFLMSLVNQVPKIVPDDFETMLNSNINDLLMVTYLANLTQSQIALNEKLVNL

SEQ ID NO: 109 - protein, 324 aa, Homo sapiens
MPELAVQKVVVHPLVLLSVVDHFNRIGKVGNQKRVVGVLLGSWQKKVLDVSNSFAVPFDEDDKDDSVWFLDHDYLENMYGMFKKVNARERIVGWYHTGPKLHKNDIAINELMKRYCPNSVLVIIDVKPKDLGLPTEAYISVEEVHDDGTPTSKTFEHVTSEIGAEEAEEVGVEHLLRDIKDTTVGTLSQRITNQVHGLKGLNSKLLDIRSYLEKVATGKLPINHQIIYQLQDVFNLLPDVSLQEFVKAFYLKTNDQMVVVYLASLIRSVVALHNLINNKIANRDAEKKEGQEKEESKKDRKEDKEKDKDKEKSDVKKEEKKEKK

SEQ ID NO: 110 - protein, 352 aa, Homo sapiens
MASRKEGTGSTATSSSSTAGAAGKGKGKGGSGDSAVKQVQIDGLVVLKIIKHYQEEGQGTEVVQGVLLGLVVEDRLEITNCFPFPQHTEDDADFDEVQYQMEMMRSLRHVNIDHLHVGWYQSTYYGSFVTRALLDSQFSYQHAIEESVVLIYDPIKTAQGSLSLKAYRLTPKLMEVCKEKDFSPEALKKANITFEYMFEEVPIVIKNSHLINVLMWELEKKSAVADKHELLSLASSNHLGKNLQLLMDRVDEMSQDIVKYNTYMRNTSKQQQQKHQYQQRRQQENMQRQSRGEPPLPEEDLSKLFKPPQPPARMDSLLIAGQINTYCQNIKEFTAQNLGKLFMAQALQEYNN

SEQ ID NO: 111 - protein, 334 aa, Homo sapiens
MAASGSGMAQKTWELANNMQEAQSIDEIYKYDKKQQQEILAAKPWTKDHHYFKYCKISALALLKMVMHARSGGNLEVMGLMLGKVDGETMIIMDSFALPVEGTETRVNAQAAAYEYMAAYIENAKQVGRLENAIGWYHSHPGYGCWLSGIDVSTQMLNQQFQEPFVAVVIDPTRTISAGKVNLGAFRTYPKGYKPPDEGPSEYQTIPLNKIEDFGVHCKQYYALEVSYFKSSLDRKLLELLWNKYWVNTLSSSSLLTNADYTTGQVFDLSEKLEQSEAQLGRGSFMLGLETHDRKSEDKLAKATRDSCKTTIEAIHGLMSQVIKDKLFNQINIS

SEQ ID NO: 112 - protein, 316 aa, Homo sapiens
MAVQVVQAVQAVHLESDAFLVCLNHALSTEKEEVMGLCIGELNDDTRSDSKFAYTGTEMRTVAEKVDAVRIVHIHSVIILRRSDKRKDRVEISPEQLSAASTEAERLAELTGRPMRVVGWYHSHPHITVWPSHVDVRTQAMYQMMDQGFVGLIFSCFIEDKNTKTGRVLYTCFQSIQAQKSSESLHGPRDFWSSSQHISIEGQKEEERYERIEIPIHIVPHVTIGKVCLESAVELPKILCQEEQDAYRRIHSLTHLDSVTKIHNGSVFTKNLCSQMSAVSGPLLQWLEDRLEQNQQHLQELQQEKEELMQELSSLE

SEQ ID NO: 113 - protein, 368 aa, Homo sapiens
SSFTIGLRGLINLGNTCFMNCIVQALTHTPILRDFFLSDRHRCEMPSPELCLVCEMSSLFRELYSGNPSPHVPYKLLHLVWIHARHLAGYRQQDAHEFLIAALDVLHRHCKGDDVGKAANNPNHCNCIIDQIFTGGLQSDVTCQACHGVSTTIDPCWDISLDLPGSCTSFWPMSPGRESSVNGESHIPGITTLTDCLRRFTRPEHLGSSAKIKCGSCQSYQESTKQLTMNKLPVVACFHFKRFEHSAKQRRKITTYISFPLELDMTPFMASSKESRMNGQLQLPTNSGNNENKYSLFAVVNHQGTLESGHYTSFIRHHKDQWFKCDDAVITKASIKDVLDSEGYLLFYHKQVLEHESEKVKEMNTQAY

SEQ ID NO: 114 - protein, 353 aa, Homo sapiens
NSFHNIDDPNCERRKKNSFVGLTNLGATCYVNTFLQVWFLNLELRQALYLCPSTCSDYMLGDGIQEEKDYEPQTICEHLQYLFALLQNSNRRYIDPSGFVKALGLDTGQQQDAQEFSKLFMSLLEDTLSKQKNPDVRNIVQQQFCGEYAYVTVCNQCGRESKLLSKFYELELNIQGHKQLTDCISEFLKEEKLEGDNRYFCENCQSKQNATRKIRLLSLPCTLNLQLMRFVFDRQTGHKKKLNTYIGFSEILDMEPYVEHKGGSYVYELSAVLIHRGVSAYSGHYIAHVKDPQSGEWYKFNDEDIEKMEGKKLQLGIEEDLAEPSKSQTRKPKCGKGTHCSRNAYMLVYRLQT

SEQ ID NO: 115 - protein, 359 aa, Homo sapiens
TAICATGLRNLGNTCFMNAILQSLSNIEQFCCYFKELPAVELRNGKTAGRRTYHTRSQGDNNVSLVEEFRKTLCALWQGSQTAFSPESLFYVVWKIMPNFRGYQQQDAHEFMRYLLDHLHLELQGGFNGVSRSAILQENSTLSASNKCCINGASTVVTAIFGGILQNEVNCLICGTESRKFDPFLDLSLDIPSQFRSKRSKNQENGPVCSLRDCLRSFTDLEELDETELYMCHKCKKKQKSTKKFWIQKLPKVLCLHLKRFHWTAYLRNKVDTYVEFPLRGLDMKCYLLEPENSGPESCLYDLAAVVVHHGSGVGSGHYTAYATHEGRWFHFNDSTVTLTDEETVVKAKAYILFYVEHQ

SEQ ID NO: 116 - protein, 300 aa, Homo sapiens
AVGAGLQNMGNTCYVNASLQCLTYTPPLANYMLSREHSQTCHRHKGCMLCTMQAHITRALHNPGHVIQPSQALAAGFHRGKQEDAHEFLMFTVDAMKKACLPGHKQVDHHSKDTTLIHQIFGGYWRSQIKCLHCHGISDTFDPYLDIALDIQAAQSVQQALEQLVKPEELNGENAYHCGVCLQRAPASKTLTLHTSAKVLILVLKRFSDVTGNKIAKNVQYPECLDMQPYMSQTNTGPLVYVLYAVLVHAGWSCHNGHYFSYVKAQEGQWYKMDDAEVTASSITSVLSQQAYVLFYIQKS

SEQ ID NO: 117 - protein, 708 aa, Homo sapiens
LPFVGLNNLGNTCYLNSILQVLYFCPGFKSGVKHLFNIISRKKEALKDEANQKDKGNCKEDSLASYELICSLQSLIISVEQLQASFLLNPEKYTDELATQPRRLLNTLRELNPMYEGYLQHDAQEVLQCILGNIQETCQLLKKEEVKNVAELPTKVEEIPHPKEEMNGINSIEMDSMRHSEDFKEKLPKGNGKRKSDTEFGNMKKKVKLSKEHQSLEENQRQTRSKRKATSDTLESPPKIIPKYISENESPRPSQKKSRVKINWLKSATKQPSILSKFCSLGKITTNQGVKGQSKENECDPEEDLGKCESDNTTNGCGLESPGNTVTPVNVNEVKPINKGEEQIGFELVEKLFQGQLVLRTRCLECESLTERREDFQDISVPVQEDELSKVEESSEISPEPKTEMKTLRWAISQFASVERIVGEDKYFCENCHHYTEAERSLLFDKMPEVITIHLKCFAASGLEFDCYGGGLSKINTPLLTPLKLSLEEWSTKPTNDSYGLFAVVMHSGITISSGHYTASVKVTDLNSLELDKGNFVVDQMCEIGKPEPLNEEEARGVVENYNDEEVSIRVGGNTQPSKVLNKKNVEAIGLLGGQKSKADYELYNKASNPDKVASTAFAENRNSETSDTTGTHESDRNKESSDQTGINISGFENKISYVVQSLKEYEGKWLLFDDSEVKVTEEKDFLNSLSPSTSPTSTPYLLFYKKL

SEQ ID NO: 118 - protein, 1164 aa, Homo sapiens
FTNLSGIRNQGGTCYLNSLLQTLHFTPEFREALFSLGPEELGLFEDKDKPDAKVRIIPLQLQRLFAQLLLLDQEAASTADLTDSFGWTSNEEMRQHDVQELNRILFSALETSLVGTSGHDLIYRLYHGTIVNQIVCKECKNVSERQEDFLDLTVAVKNVSGLEDALWNMYVEEEVFDCDNLYHCGTCDRLVKAAKSAKLRKLPPFLTVSLLRFNFDFVKCERYKETSCYTFPLRINLKPFCEQSELDDLEYIYDLFSVIIHKGGCYGGHYHVYIKDVDHLGNWQFQEEKSKPDVNLKDLQSEEEIDHPLMILKAILLEENNLIPVDQLGQKLLKKIGISWNKKYRKQHGPLRKFLQLHSQIFLLSSDESTVRLLKNSSLQAESDFQRNDQQIFKMLPPESPGLNNSISCPHWFDINDSKVQPIREKDIEQQFQGKESAYMLFYRKSQLQRPPEARANPRYGVPCHLLNEMDAANIELQTKRAECDSANNTFELHLHLGPQYHFFNGALHPVVSQTESVWDLTFDKRKTLGDLRQSIFQLLEFWEGDMVLSVAKLVPAGLHIYQSLGGDELTLCETEIADGEDIFVWNGVEVGGVHIQTGIDCEPLLLNVLHLDTSSDGEKCCQVIESPHVFPANAEVGTVLTALAIPAGVIFINSAGCPGGEGWTAIPKEDMRKTFREQGLRNGSSILIQDSHDDNSLLTKEEKWVTSMNEIDWLHVKNLCQLESEEKQVKISATVNTMVFDIRIKAIKELKLMKELADNSCLRPIDRNGKLLCPVPDSYTLKEAELKMGSSLGLCLGKAPSSSQLFLFFAMGSDVQPGTEMEIVVEETISVRDCLKLMLKKSGLQGDAWHLRKMDWCYEAGEPLCEEDATLKELLICSGDTLLLIEGQLPPLGFLKVPIWWYQLQGPSGHWESHQDQTNCTSSWGRVWRATSSQGASGNEPAQVSLLYLGDIEISEDATLAELKSQAMTLPPFLEFGVPSPAHLRAWTVERKRPGRLLRTDRQPLREYKLGRRIEICLEPLQKGENLGPQDVLLRTQVRIPGERTYAPALDLVWNAAQGGTAGSLRQRVADFYRLPVEKIEIAKYFPEKFEWLPISSWNQQITKRKKKKKQDYLQGAPYYLKDGDTIGVKNLLIDDDDDFSTIRDDTGKEKQKQRALGRRKSQ

SEQ ID NO: 119 - protein, 311 aa, Homo sapiens
TGYVGLKNQGATCYMNSLLQTLFFTNQLRKAVYMMPTEGDDSSKSVPLALQRVFYELQHSDKPVGTKKLTKSFGWETLDSFMQHDVQELCRVLLDNVENKMKGTCVEGTIPKLFRGKMVSYIQCKEVDYRSDRREDYYDIQLSIKGKKNIFESFVDYVAVEQLDGDNKYDAGEHGLQEAEKGVKFLTLPPVLHLQLMRFMYDPQTDQNIKINDRFEFPEQLPLDEFLQKTDPKDPANYILHAVLVHSGDNHGGHYVVYLNPKGDGKWCKFDDDVVSRCTKEEAIEHNYGGHDDDLSVRHCTNAYMLVYIRE

SEQ ID NO: 120 - protein, 344 aa, Homo sapiens
AVGAGLQNMGNTCYVNASLQCLTYTPPLANYMLSREHSQTCHRHKGCMLCTMQAHITRALHNPGHVIQPSQALAAGFHRGKQEDAHEFLMFTVDAMKKACLPGHKQVDHHSKDTTLIHQIFGGYWRSQIKCLHCHGISDTFDPYLDIALDIQAAQSVQQALEQLAKPEELNGENAYHCGVCLQRAPASKTLTLHTSAKVLILVLKRFSDVTGNKIAKNVQYPECLDMQPYMSQPNTGPLVYVLYAVLVHAGWSCHNGHYFSYVKAQEGQWYKMDDAEVTASSITSVLSQQAYVLFYIQKSEWERHSESVSRGREPRALGAEDTDRRATQGELKRDHPCLQAPEL

SEQ ID NO: 121 - protein, 344 aa, Homo sapiens
AVGAGLQNMGNTCYVNASLQCLTYTPPLANYMLSREHSQTCHRHKGCMLCTMQAHITRALHNPGHVIQPSQALAAGFHRGKQEDAHEFLMFTVDAMKKACLPGHKQVDHHSKDTTLIHQIFGGYWRSQIKCLHCHGISDTFDPYLDIALDIQAAQSVQQALEQLVKPEELNGENAYHCGVCLQRAPASKMLTLLTSAKVLILVLKRFSDVTGNKIAKNVQYPECLDMQPYMSQPNTGPLVYVLYAVLVHAGWSCHNGHYFSYVKAQEGQWYKMDDAEVTASSITSVLSQQAYVLFYIQKSEWERHSESVSRGREPRALGAEDTDRRATQGELKRDHPCLQAPEL

SEQ ID NO: 122 - protein, 344 aa, Homo sapiens
AVGAGLQNMGNTCYVNASLQCLTYKPPLANYMLFREHSQTCHRHKGCMLCTMQAHITRALHIPGHVIQPSQALAAGFHRGKQEDAHEFLMFTVDAMRKACLPGHKQVDRHSKDTTLIHQIFGGYWRSQIKCLHCHGISDTFDPYLDIALDIQAAQSVQQALEQLVKPEELNGENAYHCGVCLQRAPASKTLTLHNSAKVLILVLKRFPDVTGNKIAKNVQYPECLDMQPYMSQQNTGPLVYVLYAVLVHAGWSCHNGHYSSYVKAQEGQWYKMDDAEVTASSITSVLSQQAYVLFYIQKSEWERHSESVSRGREPRALGVEDTDRRATQGELKRDHPCLQAPEL

SEQ ID NO: 123 - protein, 307 aa, Homo sapiens
WGLVGLHNIGQTCCLNSLIQVFVMNVDFARILKRITVPRGADEQRRSVPFQMLLLLEKMQDSRQKAVWPLELAYCLQKYNVPLFVQHDAAQLYLKLWNLIKDQIADVHLVERLQALYMIRMKDSLICLDCAMESSRNSSMLTLRLSFFDVDSKPLKTLEDALHCFFQPRELSSKSKCFCENCGKKTRGKQVLKLTHLPQTLTIHLMRFSIRNSQTRKICHSLYFPQSLDFSQILPMKRESCDAEEQSGGQYELFAVIAHVGMADSGHYCVYIRNAVDGKWFCFNDSNICLVSWEDIQCTYGNPNYHW

SEQ ID NO: 124 - protein, 511 aa, Homo sapiens
SETGKTGLINLGNTCYMNSVIQALFMATDFRRQVLSLNLNGCNSLMKKLQHLFAFLAHTQREAYAPRIFFEASRPPWFTPRSQQDCSEYLRFLLDRLHEEEKILKVQASHKPSEILECSETSLQEVASKAAVLTETPRTSDGEKTLIEKMFGGKLRTHIRCLNCRSTSQKVEAFTDLSLAFCPSSSLENMSVQDPASSPSIQDGGLMQASVPGPSEEPVVYNPTTAAFICDSLVNEKTIGSPPNEFYCSENTSVPNESNKILVNKDVPQKPGGETTPSVTDLLNYFLAPEILTGDNQYYCENCASLQNAEKTMQITEEPEYLILTLLRFSYDQKYHVRRKILDNVSLPLVLELPVKRITSFSSLSESWSVDVDFTDLSENLAKKLKPSGTDEASCTKLVPYLLSSVVVHSGISSESGHYYSYARNITSTDSSYQMYHQSEALALASSQSHLLGRDSPSAVFEQDLENKEMSKEWFLFNDSRVTFTSFQSVQKITSRFPKDTAYVLLYKKQH

SEQ ID NO: 125 - protein, 616 aa, Homo sapiens
RPPGAQGLKNHGNTCFMNAVVQCLSNTDLLAEFLALGRYRAAPGRAEVTEQLAALVRALWTREYTPQLSAEFKNAVSKYGSQFQGNSQHDALEFLLWLLDRVHEDLEGSSRGPVSEKLPPEATKTSENCLSPSAQLPLGQSFVQSHFQAQYRSSLTCPHCLKQSNTFDPFLCVSLPIPLRQTRFLSVTLVFPSKSQRFLRVGLAVPILSTVAALRKMVAEEGGVPADEVILVELYPSGFQRSFFDEEDLNTIAEGDNVYAFQVPPSPSQGTLSAHPLGLSASPRLAAREGQRFSLSLHSESKVLILFCNLVGSGQQASRFGPPFLIREDRAVSWAQLQQSILSKVRHLMKSEAPVQNLGSLFSIRVVGLSVACSYLSPKDSRPLCHWAVDRVLHLRRPGGPPHVKLAVEWDSSVKERLFGSLQEERAQDADSVWQQQQAHQQHSCTLDECFQFYTKEEQLAQDDAWKCPHCQVLQQGMVKLSLWTLPDILIIHLKRFCQVGERRNKLSTLVKFPLSGLNMAPHVAQRSTSPEAGLGPWPSWKQPDCLPTSYPLDFLYDLYAVCNHHGNLQGGHYTAYCRNSLDGQWYSYDDSTVEPLREDEVNTRGAYILFYQKRN

SEQ ID NO: 126 - protein, 339 aa, Homo sapiens
SAQGLAGLRNLGNTCFMNSILQCLSNTRELRDYCLQRLYMRDLHHGSNAHTALVEEFAKLIQTIWTSSPNDVVSPSEFKTQIQRYAPRFVGYNQQDAQEFLRFLLDGLHNEVNRVTLRPKSNPENLDHLPDDEKGRQMWRKYLEREDSRIGDLFVGQLKSSLTCTDCGYCSTVFDPFWDLSLPIAKRGYPEVTLMDCMRLFTKEDVLDGDEKPTCCRCRGRKRCIKKFSIQRFPKILVLHLKRFSESRIRTSKLTTFVNFPLRDLDLREFASENTNHAVYNLYAVSNHSGTTMGGHYTAYCRSPGTGEWHTFNDSSVTPMSSSQVRTSDAYLLFYELAS

SEQ ID NO: 127 - protein, 628 aa, Homo sapiens
LSVRGITNLGNTCFFNAVMQNLAQTYTLTDLMNEIKESSTKLKIFPSSDSQLDPLVVELSRPGPLTSALFLFLHSMKETEKGPLSPKVLFNQLCQKAPRFKDFQQQDSQELLHYLLDAVRTEETKRIQASILKAFNNPTTKTADDETRKKVKAYGKEGVKMNFIDRIFIGELTSTVMCEECANISTVKDPFIDISLPIIEERVSKPLLWGRMNKYRSLRETDHDRYSGNVTIENIHQPRAAKKHSSSKDKSQLIHDRKCIRKLSSGETVTYQKNENLEMNGDSLMFASLMNSESRLNESPTDDSEKEASHSESNVDADSEPSESESASKQTGLFRSSSGSGVQPDGPLYPLSAGKLLYTKETDSGDKEMAEAISELRLSSTVTGDQDFDRENQPLNISNNLCFLEGKHLRSYSPQNAFQTLSQSYITTSKECSIQSCLYQFTSMELLMGNNKLLCENCTKNKQKYQEETSFAEKKVEGVYTNARKQLLISAVPAVLILHLKRFHQAGLSLRKVNRHVDFPLMLDLAPFCSATCKNASVGDKVLYGLYGIVEHSGSMREGHYTAYVKVRTPSRKLSEHNTKKKNVPGLKAADNESAGQWVHVSDTYLQVVPESRALSAQAYLLFYERVL

SEQ ID NO: 128 - protein, 876 aa, Homo sapiens
TEKGATGLSNLGNTCFMNSSIQCVSNTQPLTQYFISGRHLYELNRTNPIGMKGHMAKCYGDLVQELWSGTQKNVAPLKLRWTIAKYAPRFNGFQQQDSQELLAFLLDGLHEDLNRVHEKPYVELKDSDGRPDWEVAAEAWDNHLRRNRSIVVDLFHGQLRSQVKCKTCGHISVRFDPFNFLSLPLPMDSYMHLEITVIKLDGTTPVRYGLRLNMDEKYTGLKKQLSDLCGLNSEQILLAEVHGSNIKNFPQDNQKVRLSVSGFLCAFEIPVPVSPISASSPTQTDFSSSPSTNEMFTLTTNGDLPRPIFIPNGMPNTVVPCGTEKNFTNGMVNGHMPSLPDSPFTGYIIAVHRKMMRTELYFLSSQKNRPSLFGMPLIVPCTVHTRKKDLYDAVWIQVSRLASPLPPQEASNHAQDCDDSMGYQYPFTLRVVQKDGNSCAWCPWYRFCRGCKIDCGEDRAFIGNAYIAVDWDPTALHLRYQTSQERVVDEHESVEQSRRAQAEPINLDSCLRAFTSEEELGENEMYYCSKCKTHCLATKKLDLWRLPPILIIHLKRFQFVNGRWIKSQKIVKFPRESFDPSAFLVPRDPALCQHKPLTPQGDELSEPRILAREVKKVDAQSSAGEEDVLLSKSPSSLSANIISSPKGSPSSSRKSGTSCPSSKNSSPNSSPRTLGRSKGRLRLPQIGSKNKLSSSKENLDASKENGAGQICELADALSRGHVLGGSQPELVTPQDHEVALANGFLYEHEACGNGYSNGQLGNHSEEDSTDDQREDTRIKPIYNLYAISCHSGILGGGHYVTYAKNPNCKWYCYNDSSCKELHPDEIDTDSAYILFYEQQGIDYAQFLPKTDGKKMADTSSMDEDFESDYKKYCVLQ

SEQ ID NO: 129 - protein, 300 aa, Homo sapiens
AVGAGLQNMGNTCYVNASLQCLTYTPPLANYMLSREHSQTCHRHKGCMLCTMQAHITRALHNPGHVIQPSQALAAGFHRGKQEDAHEFLMFTVDAMKKACLPGHKQVDHHSKDTTLIHQIFGGYWRSQIKCLHCHGISDTFDPYLDIALDIQAAQSVQQALEQLVKPEELNGENAYHCGVCLQRAPASKTLTLHTSAKVLILVLKRFSDVTGNKIAKNVQYPECLDMQPYMSQQNTGPLVYVLYAVLVHAGWSCHNGHYFSYVKAQEGQWYKMDDAEVTASSITSVLSQQAYVLFYIQKS

SEQ ID NO: 130 - protein, 313 aa, Homo sapiens
RVGAGLQNLGNTCFANAALQCLTYTPPLANYMLSHEHSKTCHAEGFCMMCTMQAHITQALSNPGDVIKPMFVINEMRRIARHFRFGNQEDAHEFLQYTVDAMQKACLNGSNKLDRHTQATTLVCQIFGGYLRSRVKCLNCKGVSDTFDPYLDITLEIKAAQSVNKALEQFVKPEQLDGENSYKCSKCKKMVPASKRFTIHRSSNVLTLSLKRFANFTGGKIAKDVKYPEYLDIRPYMSQPNGEPIVYVLYAVLVHTGFNCHAGHYFCYIKASNGLWYQMNDSIVSTSDIRSVLSQQAYVLFYIRSHDVKNGGE

SEQ ID NO: 131 - protein, 344 aa, Homo sapiens
AVGAGLQKIGNTFYVNVSLQCLTYTLPLSNYMLSREDSQTCHLHKCCMFCTMQAHITWALHSPGHVIQPSQVLAAGFHRGEQEDAHEFLMFTVDAMKKACLPGHKQLDHHSKDTTLIHQIFGAYWRSQIKYLHCHGVSDTFDPYLDIALDIQAAQSVKQALEQLVKPKELNGENAYHCGLCLQKAPASKTLTLPTSAKVLILVLKRFSDVTGNKLAKNVQYPKCRDMQPYMSQQNTGPLVYVLYAVLVHAGWSCHNGHYFSYVKAQEGQWYKMDDAEVTASGITSVLSQQAYVLFYIQKSEWERHSESVSRGREPRALGAEDTDRPATQGELKRDHPCLQVPEL

SEQ ID NO: 132 - protein, 344 aa, Homo sapiens
AVGAGLQNMGNTCYVNASLQCLTYTPPLANYMLSREHSQTCHRHKGCMLCTMQAHITRALHNPGHVIQPSQALAAGFHRGKQEDAHEFLMFTVDAMKKACLPGHKQVDHHSKDTTLIHQIFGGYWRSQIKCLHCHGISDTFDPYLDIALDIQAAQSVQQALEQLVKPEELNGENAYHCGVCLQRAPASKTLTLHTSAKVLILVLKRFSDVTGNKIAKNVQYPECLDMQPYMSQQNTGPLVYVLYAVLVHAGWSCHNGHYFSYVKAQEGQWYKMDDAEVTAASITSVLSQQAYVLFYIQKSEWERHSESVSRGREPRALGAEDTDRRATQGELKRDHPCLQAPEL

SEQ ID NO: 133 - protein, 533 aa, Homo sapiens
YGPGYTGLKNLGNSCYLSSVMQAIFSIPEFQRAYVGNLPRIFDYSPLDPTQDFNTQMTKLGHGLLSGQYSKPPVKSELIEQVMKEEHKPQQNGISPRMFKAFVSKSHPEFSSNRQQDAQEFFLHLVNLVERNRIGSENPSDVFRFLVEERIQCCQTRKVRYTERVDYLMQLPVAMEAATNKDELIAYELTRREAEANRRPLPELVRAKIPFSACLQAFSEPENVDDFWSSALQAKSAGVKTSRFASFPEYLVVQIKKFTFGLDWVPKKFDVSIDMPDLLDINHLRARGLQPGEEELPDISPPIVIPDDSKDRLMNQLIDPSDIDESSVMQLAEMGFPLEACRKAVYFTGNMGAEVAFNWIIVHMEEPDFAEPLTMPGYGGAASAGASVFGASGLDNQPPEEIVAIITSMGFQRNQAIQALRATNNNLERALDWIFSHPEFEEDSDFVIEMENNANANIISEAKPEGPRVKDGSGTYELFAFISHMGTSTMSGHYICHIKKEGRWVIYNDHKVCASERPPKDLGYMYFYRRIPS

SEQ ID NO: 134 - protein, 629 aa, Homo sapiens
KGQPGICGLTNLGNTCFMNSALQCLSNVPQLTEYFLNNCYLEELNFRNPLGMKGEIAEAYADLVKQAWSGHHRSIVPHVFKNKVGHFASQFLGYQQHDSQELLSFLLDGLHEDLNRVKKKEYVELCDAAGRPDQEVAQEAWQNHKRRNDSVIVDTFHGLFKSTLVCPDCGNVSVTFDPFCYLSVPLPISHKRVLEVFFIPMDPRRKPEQHRLVVPKKGKISDLCVALSKHTGISPERMMVADVFSHRFYKLYQLEEPLSSILDRDDIFVYEVSGRIEAIEGSREDIVVPVYLRERTPARDYNNSYYGLMLFGHPLLVSVPRDRFTWEGLYNVLMYRLSRYVTKPNSDDEDDGDEKEDDEEDKDDVPGPSTGGSLRDPEPEQAGPSSGVTNRCPFLLDNCLGTSQWPPRRRRKQLFTLQTVNSNGTSDRTTSPEEVHAQPYIAIDWEPEMKKRYYDEVEAEGYVKHDCVGYVMKKAPVRLQECIELFTTVETLEKENPWYCPSCKQHQLATKKLDLWMLPEILIIHLKRFSYTKFSREKLDTLVEFPIRDLDFSEFVIQPQNESNPELYKYDLIAVSNHYGGMRDGHYTTFACNKDSGQWHYFDDNSVSPVNENQIESKAAYVLFYQRQD

SEQ ID NO: 135 - protein, 300 aa, Homo sapiens
AVGAGLQNMGNTCYENASLQCLTYTLPLANYMLSREHSQTCQRPKCCMLCTMQAHITWALHSPGHVIQPSQALAAGFHRGKQEDVHEFLMFTVDAMKKACLPGHKQVDHHCKDTTLIHQIFGGCWRSQIKCLHCHGISDTFDPYLDIALDIQAAQSVKQALEQLVKPEELNGENAYHCGLCLQRAPASNTLTLHTSAKVLILVLKRFSDVAGNKLAKNVQYPECLDMQPYMSQQNTGPLVYVLYAVLVHAGWSCHDGHYFSYVKAQEVQWYKMDDAEVTVCSIISVLSQQAYVLFYIQKS

SEQ ID NO: 136 - protein, 387 aa, Homo sapiens
ASAMELPCGLTNLGNTCYMNATVQCIRSVPELKDALKRYAGALRASGEMASAQYITAALRDLFDSMDKTSSSIPPIILLQFLHMAFPQFAEKGEQGQYLQQDANECWIQMMRVLQQKLEAIEDDSVKETDSSSASAATPSKKKSLIDQFFGVEFETTMKCTESEEEEVTKGKENQLQLSCFINQEVKYLFTGLKLRLQEEITKQSPTLQRNALYIKSSKISRLPAYLTIQMVRFFYKEKESVNAKVLKDVKFPLMLDMYELCTPELQEKMVSFRSKFKDLEDKKVNQQPNTSDKKSSPQKEVKYEPFSFADDIGSNNCGYYDLQAVLTHQGRSSSSGHYVSWVKRKQDEWIKFDDDKVSIVTPEDILRLSGGGDWHIAYVLLYGPRR

SEQ ID NO: 137 - protein, 630 aa, Homo sapiens
SHIQPGLCGLGNLGNTCFMNSALQCLSNTAPLTDYFLKDEYEAEINRDNPLGMKGEIAEAYAELIKQMWSGRDAHVAPRMFKTQVGRFAPQFSGYQQQDSQELLAFLLDGLHEDLNRVKKKPYLELKDANGRPDAVVAKEAWENHRLRNDSVIVDTFHGLFKSTLVCPECAKVSVTFDPFCYLTLPLPLKKDRVMEVFLVPADPHCRPTQYRVTVPLMGAVSDLCEALSRLSGIAAENMVVADVYNHRFHKIFQMDEGLNHIMPRDDIFVYEVCSTSVDGSECVTLPVYFRERKSRPSSTSSASALYGQPLLLSVPKHKLTLESLYQAVCDRISRYVKQPLPDEFGSSPLEPGACNGSRNSCEGEDEEEMEHQEEGKEQLSETEGSGEDEPGNDPSETTQKKIKGQPCPKRLFTFSLVNSYGTADINSLAADGKLLKLNSRSTLAMDWDSETRRLYYDEQESEAYEKHVSMLQPQKKKKTTVALRDCIELFTTMETLGEHDPWYCPNCKKHQQATKKFDLWSLPKILVVHLKRFSYNRYWRDKLDTVVEFPIRGLNMSEFVCNLSARPYVYDLIAVSNHYGAMGVGHYTAYAKNKLNGKWYYFDDSNVSLASEDQIVTKAAYVLFYQRRD

SEQ ID NO: 138 - protein, 595 aa, Homo sapiens
KICHGLPNLGNTCYMNAVLQSLLSIPSFADDLLNQSFPWGKIPLNALTMCLARLLFFKDTYNIEIKEMLLLNLKKAISAAAEIFHGNAQNDAHEFLAHCLDQLKDNMEKLNTIWKPKSEFGEDNFPKQVFADDPDTSGFSCPVITNFELELLHSIACKACGQVILKTELNNYLSINLPQRIKAHPSSIQSTFDLFFGAEELEYKCAKCEHKTSVGVHSFSRLPRILIVHLKRYSLNEFCALKKNDQEVIISKYLKVSSHCNEGTRPPLPLSEDGEITDFQLLKVIRKMTSGNISVSWPATKESKDILAPHIGSDKESEQKKGQTVFKGASRRQQQKYLGKNSKPNELESVYSGDRAFIEKEPLAHLMTYLEDTSLCQFHKAGGKPASSPGTPLSKVDFQTVPENPKRKKYVKTSKFVAFDRIINPTKDLYEDKNIRIPERFQKVSEQTQQCDGMRICEQAPQQALPQSFPKPGTQGHTKNLLRPTKLNLQKSNRNSLLALGSNKNPRNKDILDKIKSKAKETKRNDDKGDHTYRLISVVSHLGKTLKSGHYICDAYDFEKQIWFTYDDMRVLGIQEAQMQEDRRCTGYIFFYMHN

SEQ ID NO: 139 - protein, 723 aa, Homo sapiens
LPGFTGLVNLGNTCFMNSVIQSLSNTRELRDFFHDRSFEAEINYNNPLGTGGRLAIGFAVLLRALWKGTHHAFQPSKLKAIVASKASQFTGYAQHDAQEFMAFLLDGLHEDLNRIQNKPYTETVDSDGRPDEVVAEEAWQRHKMRNDSFIVDLFQGQYKSKLVCPVCAKVSITFDPFLYLPVPLPQKQKVLPVFYFAREPHSKPIKFLVSVSKENSTASEVLDSLSQSVHVKPENLRLAEVIKNRFHRVFLPSHSLDTVSPSDTLLCFELLSSELAKERVVVLEVQQRPQVPSVPISKCAACQRKQQSEDEKLKRCTRCYRVGYCNQLCQKTHWPDHKGLCRPENIGYPFLVSVPASRLTYARLAQLLEGYARYSVSVFQPPFQPGRMALESQSPGCTTLLSTGSLEAGDSERDPIQPPELQLVTPMAEGDTGLPRVWAAPDRGPVPSTSGISSEMLASGPIEVGSLPAGERVSRPEAAVPGYQHPSEAMNAHTPQFFIYKIDSSNREQRLEDKGDTPLELGDDCSLALVWRNNERLQEFVLVASKELECAEDPGSAGEAARAGHFTLDQCLNLFTRPEVLAPEEAWYCPQCKQHREASKQLLLWRLPNVLIVQLKRFSFRSFIWRDKINDLVEFPVRNLDLSKFCIGQKEEQLPSYDLYAVINHYGGMIGGHYTACARLPNDRSSQRSDVGWRLFDDSTVTTVDESQVVTRYAYVLFYRRRN

SEQ ID NO: 140 - protein, 386 aa, Homo sapiens
SLQPRGLINKGNWCYINATLQALVACPPMYHLMKFIPLYSKVQRPCTSTPMIDSFVRLMNEFTNMPVPPKPRQALGDKIVRDIRPGAAFEPTYIYRLLTVNKSSLSEKGRQEDAEEYLGFILNGLHEEMLNLKKLLSPSNEKLTISNGPKNHSVNEEEQEEQGEGSEDEWEQVGPRNKTSVTRQADFVQTPITGIFGGHIRSVVYQQSSKESATLQPFFTLQLDIQSDKIRTVQDALESLVARESVQGYTTKTKQEVEISRRVTLEKLPPVLVLHLKRFVYEKTGGCQKLIKNIEYPVDLEISKELLSPGVKNKNFKCHRTYRLFAVVYHHGNSATGGHYTTDVFQIGLNGWLRIDDQTVKVINQYQVVKPTAERTAYLLYYRRVD

SEQ ID NO: 141 - protein, 658 aa, Homo sapiens
MDRCKHVGRLRLAQDHSILNPQKWCCLECATTESVWACLKCSHVACGRYIEDHALKHFEETGHPLAMEVRDLYVFCYLCKDYVLNDNPEGDLKLLRSSLLAVRGQKQDTPVRRGRTLRSMASGEDVVLPQRAPQGQPQMLTALWYRRQRLLARTLRLWFEKSSRGQAKLEQRRQEEALERKKEEARRRRREVKRRLLEELASTPPRKSARLLLHTPRDAGPAASRPAALPTSRRVPAATLKLRRQPAMAPGVTGLRNLGNTCYMNSILQVLSHLQKFRECFLNLDPSKTEHLFPKATNGKTQLSGKPTNSSATELSLRNDRAEACEREGFCWNGRASISRSLELIQNKEPSSKHISLCRELHTLFRVMWSGKWALVSPFAMLHSVWSLIPAFRGYDQQDAQEFLCELLHKVQQELESEGTTRRILIPFSQRKLTKQVLKVVNTIFHGQLLSQVTCISCNYKSNTIEPFWDLSLEFPERYHCIEKGFVPLNQTECLLTEMLAKFTETEALEGRIYACDQCNSKRRKSNPKPLVLSEARKQLMIYRLPQVLRLHLKRFRWSGRNHREKIGVHVVFDQVLTMEPYCCRDMLSSLDKETFAYDLSAVVMHHGKGFGSGHYTAYCYNTEGGFWVHCNDSKLNVCSVEEVCKTQAYILFYTQRT

SEQ ID NO: 142 - protein, 300 aa, Homo sapiens
AVGAGLQNMGNTCYLNASLQCLTYTPPLANYMLSREHSQTCQRPKCCMLCTMQAHITWALHSPGHVIQPSQALAAGFHRGKQEDAHEFLMFTVDAMKKACLPGHKQVDHHSKDTTLIHQIFGGCWRSQIKCLHCHGISDTFDPYLDIALDIQAAQSVKQALEQLVKPEELNGENAYPCGLCLQRAPASNTLTLHTSAKVLILVLKRFCDVTGNKLAKNVQYPECLDMQPYMSQQNTGPLVYVLYAVLVHAGWSCHNGYYFSYVKAQEGQWYKMDDAEVTACSITSVLSQQAYVLFYIQKS

SEQ ID NO: 143 - protein, 311 aa, Homo sapiens; identical to SEQ ID NO: 119

SEQ ID NO: 144 - protein, 338 aa, Homo sapiens
AQGLAGLRNLGNTCFMNSILQCLSNTRELRDYCLQRLYMRDLHHGSNAHTALVEEFAKLIQTIWTSSPNDVVSPSEFKTQIQRYAPRFVGYNQQDAQEFLRFLLDGLHNEVNRVTLRPKSNPENLDHLPDDEKGRQMWRKYLEREDSRIGDLFVGQLKSSLTCTDCGYCSTVFDPFWDLSLPIAKRGYPEVTLMDCMRLFTKEDVLDGDEKPTCCRCRGRKRCIKKFSIQRFPKILVLHLKRFSESRIRTSKLTTFVNFPLRDLDLREFASENTNHAVYNLYAVSNHSGTTMGGHYTAYCRSPGTGEWHTFNDSSVTPMSSSQVRTSDAYLLFYELAS

SEQ ID NO: 145 - protein, 363 aa, Homo sapiens
MIGKKKGIQGHYNSCYLDSTLFCLFAFSSVLDTVLLRPKEKNDVEYYSETQELLRTEIVNPLRIYGYVCATKIMKLRKILEKVEAASGFTSEEKDPEEFLNILFHHILRVEPLLKIRSAGQKVQDCYFYQIFMEKNEKVGVPTIQQLLEWSFINSNLKFAEAPSCLIIQMPRFGKDFKLFKKIFPSLELNITDLLEDTPRQCRICGGLAMYECRECYDDPDISAGKIKQFCKTCNTQVHLHPKRLNHKYNPVSLPKDLPDWDWRHGCIPCQNMELFAVLCIETSHYVAFVKYGKDDSAWLFFDSMADRDGGQNGFNIPQVTPCPEVGEYLKMSLEDLHSLDSRRIQGCARRLLCDAYMCMYQS

SEQ ID NO: 146 - protein, 300 aa, Homo sapiens; identical to SEQ ID NO: 116

SEQ ID NO: 147 - protein, 341 aa, Homo sapiens
LGNTCFMNCIVQALTHTPLLRDFFLSDRHRCEMQSPSSCLVCEMSSLFQEFYSGHRSPHIPYKLLHLVWTHARHLAGYEQQDAHEFLIAALDVLHRHCKGDDNGKKANNPNHCNCIIDQIFTGGLQSDVTCQVCHGVSTTIDPFWDISLDLPGSSTPFWPLSPGSEGNVVNGESHVSGTTTLTDCLRRFTRPEHLGSSAKIKCSGCHSYQESTKQLTMKKLPIVACFHLKRFEHSAKLRRKITTYVSFPLELDMTPFMASSKESRMNGQYQQPTDSLNNDNKYSLFAVVNHQGTLESGHYTSFIRQHKDQWFKCDDAIITKASIKDVLDSEGYLLFYHKQF

SEQ ID NO: 148 - protein, 440 aa, Homo sapiens
KGLVPGLVNLGNTCFMNSLLQGLSACPAFIRWLEEFTSQYSRDQKEPPSHQYLSLTLLHLLKALSCQEVTDDEVLDASCLLDVLRMYRWQISSFEEQDAHELFHVITSSLEDERDRQPRVTHLFDVHSLEQQSEITPKQITCRTRGSPHPTSNHWKSQHPFHGRLTSNMVCKHCEHQSPVRFDTFDSLSLSIPAATWGHPLTLDHCLHHFISSESVRDVVCDNCTKIEAKGTLNGEKVEHQRTTFVKQLKLGKLPQCLCIHLQRLSWSSHGTPLKRHEHVQFNEFLMMDIYKYHLLGHKPSQHNPKLNKNPGPTLELQDGPGAPTPVLNQPGAPKTQIFMNGACSPSLLPTLSAPMPFPLPVVPDYSSSTYLFRLMAVVVHHGDMHSGHFVTYRRSPPSARNPLSTSNQWLWVSDDTVRKASLQEVLSSSAYLLFYERVL

SEQ ID NO: 149 - protein, 496 aa, Homo sapiens
GWPVGLKNVGNTCWFSAVIQSLFQLPEFRRLVLSYSLPQNVLENCRSHTEKRNIMFMQELQYLFALMMGSNRKFVDPSAALDLLKGAFRSSEEQQQDVSEFTHKLLDWLEDAFQLAVNVNSPRNKSENPMVQLFYGTFLTEGVREGKPFCNNETFGQYPLQVNGYRNLDECLEGAMVEGDVELLPSDHSVKYGQERWFTKLPPVLTFELSRFEFNQSLGQPEKIHNKLEFPQIIYMDRYMYRSKELIRNKRECIRKLKEEIKILQQKLERYVKYGSGPARFPLPDMLKYVIEFASTKPASESCPPESDTHMTLPLSSVHCSVSDQTSKESTSTESSSQDVESTFSSPEDSLPKSKPLTSSRSSMEMPSQPAPRTVTDEEINFVKTCLQRWRSEIEQDIQDLKTCIASTTQTIEQMYCDPLLRQVPYRLHAVLVHEGQANAGHYWAYIYNQPRQSWLKYNDISVTESSWEEVERDSYGGLRNVSAYCLMYINDKLPY

SEQ ID NO: 150 - protein, 300 aa, Homo sapiens
AVGAGLQNMGNTCYENASLQCLTYTPPLANYMLSREHSQTCQRPKCCMLCTMQAHITWALHSPGHVIQPSQALAAGFHRGKQEDAHEFLMFTVDAMKKACLPGHKQVDHHSKDTTLIHQIFGGCWRSQIKCLHCHGISDTFDPYLDIALDIQAAQSVKQALEQLVKPEELNGENAYHCGLCLQRAPASKTLTLHTSAKVLILVLKRFSDVTGNKLAKNVQYPECLDMQPYMSQQNTGPLVYVLYAVLVHAGWSCHDGHYFSYVKAQEGQWYKMDDAKVTACSITSVLSQQAYVLFYIQKS

SEQ ID NO: 151 - protein, 644 aa, Homo sapiens
PVPGVAGLRNHGNTCFMNATLQCLSNTELFAEYLALGQYRAGRPEPSPDPEQPAGRGAQGQGEVTEQLAHLVRALWTLEYTPQHSRDFKTIVSKNALQYRGNSQHDAQEFLLWLLDRVHEDLNHSVKQSGQPPLKPPSETDMMPEGPSFPVCSTFVQELFQAQYRSSLTCPHCQKQSNTFDPFLCISLPIPLPHTRPLYVTVVYQGKCSHCMRIGVAVPLSGTVARLREAVSMETKIPTDQIVLTEMYYDGFHRSFCDTDDLETVHESDCIFAFETPEIFRPEGILSQRGIHLNNNLNHLKFGLDYHRLSSPTQTAAKQGKMDSPTSRAGSDKIVLLVCNRACTGQQGKRFGLPFVLHLEKTIAWDLLQKEILEKMKYFLRPTVCIQVCPFSLRVVSVVGITYLLPQEEQPLCHPIVERALKSCGPGGTAHVKLVVEWDKETRDFLFVNTEDEYIPDAESVRLQRERHHQPQTCTLSQCFQLYTKEERLAPDDAWRCPHCKQLQQGSITLSLWTLPDVLIIHLKRFRQEGDRRMKLQNMVKFPLTGLDMTPHVVKRSQSSWSLPSHWSPWRRPYGLGRDPEDYIYDLYAVCNHHGTMQGGHYTAYCKNSVDGLWYCFDDSDVQQLSEDEVCTQTAYILFYQRRT

SEQ ID NO: 152 - protein, 344 aa, Homo sapiens
AVGAGLQNMGNTCYVNASLQCLTYTPPLANYMLSREHSQTCHRHKGCMLCTMQAHITRALHNPGHVIQPSQALAAGFHRGKQEDAHEFLMFTVDAMKKACLPGHKQVDHHSKDTTLIHQIFGGYWRSQIKCLHCHGISDTFDPYLDIALDIQAAQSVQQALEQLVKPEELNGENAYHCGVCLQRAPASKTLTLHTSAKVLILVLKRFSDVTGNKIAKNVQYPECLDMQPYMSQTNTGPLVYVLYAVLVHAGWSCHNGHYFSYVKAQEGQWYKMDDAEVTASSITSVLSQQAYVLFYIQKSEWERHSESVSRGREPRALGAEDTDRRATQGELKRDHPCLQAPEL

SEQ ID NO: 153 - protein, 300 aa, Homo sapiens
AVGAGLQNMGNTCYVNASLQCLTYTPPLANYMLSREHSQTCHRHKGCMLCTMQAHITRALHNPGHVIQPSQALAAGFHRGKQEDAHEFLMFTVDAMKKACLPGHKQVDHHSKDTTLIHQIFGGYWRSQIKCLHCHGISDTFDPYLDIALDIQAAQSVQQALEQLVKPEELNGENAYHCGVCLQRAPASKTLTLHTSAKVLILVLKRFSDVTGNKIDKNVQYPECLDMKLYMSQTNSGPLVYVLYAVLVHAGWSCHNGHYFSYVKAQEGQWYKMDDAEVTASSITSVLSQQAYVLFYIQKS

SEQ ID NO: 154 - protein, 382 aa, Homo sapiens
ETGYVGLVNQAMTCYLNSLLQTLFMTPEFRNALYKWEFEESEEDPVTSIPYQLQRLFVLLQTSKKRAIETTDVTRSFGWDSSEAWQQHDVQELCRVMFDALEQKWKQTEQADLINELYQGKLKDYVRCLECGYEGWRIDTYLDIPLVIRPYGSSQAFASVEEALHAFIQPEILDGPNQYFCERCKKKCDARKGLRFLHFPYLLTLQLKRFDFDYTTMHRIKLNDRMTFPEELDMSTFIDVEDEKSPQTESCTDSGAENEGSCHSDQMSNDFSNDDGVDEGICLETNSGTEKISKSGLEKNSLIYELFSVMVHSGSAAGGHYYACIKSFSDEQWYSFNDQHVSRITQEDIKKTHGGSSGSRGYYSSAFASSTNAYMLIYRLKD

SEQ ID NO: 155 - protein, 350 aa, Homo sapiens
YTVGLRGLINLGNTCFMNCIVQALTHIPLLKDFFLSDKHKCIMTSPSLCLVCEMSSLFHAMYSGSRTPHIPYKLLHLIWIHAEHLAGYRQQDAHEFLIAILDVLHRHSKDDSGGQEANNPNCCNCIIDQIFTGGLQSDVTCQACHSVSTTIDPCWDISLDLPGSCATFDSQNPERADSTVSRDDHIPGIPSLTDCLQWFTRPEHLGSSAKIKCNSCQSYQESTKQLTMKKLPIVACFHLKRFEHVGKQRRKINTFISFPLELDMTPFLASTKESRMKEGQPPTDCVPNENKYSLFAVINHHGTLESGHYTSFIRQQKDQWFSCDDAIITKATIEDLLYSEGYLLFYHKQG

SEQ ID NO: 156 - protein, 306 aa, Homo sapiens
RVGAGLHNLGNTCFLNATIQCLTYTPPLANYLLSKEHARSCHQGSFCMLCVMQNHIVQAFANSGNAIKPVSFIRDLKKIARHFRFGNQEDAHEFLRYTIDAMQKACLNGCAKLDRQTQATTLVHQIFGGYLRSRVKCSVCKSVSDTYDPYLDVALEIRQAANIVRALELFVKADVLSGENAYMCAKCKKKVPASKRFTIHRTSNVLTLSLKRFANFSGGKITKDVGYPEFLNIRPYMSQNNGDPVMYGLYAVLVHSGYSCHAGHYYCYVKASNGQWYQMNDSLVHSSNVKVVLNQQAYVLFYLRIP

SEQ ID NO: 157 - protein, 411 aa, Homo sapiens
TPGVTGLRNLGNTCYMNSVLQVLSHLLIFRQCFLKLDLNQWLAMTASEKTRSCKHPPVTDTVVYQMNECQEKDTGFVCSRQSSLSSGLSGGASKGRKMELIQPKEPTSQYISLCHELHTLFQVMWSGKWALVSPFAMLHSVWRLIPAFRGYAQQDAQEFLCELLDKIQRELETTGTSLPALIPTSQRKLIKQVLNVVNNIFHGQLLSQVTCLACDNKSNTIEPFWDLSLEFPERYQCSGKDIASQPCLVTEMLAKFTETEALEGKIYVCDQCNSKRRRFSSKPVVLTEAQKQLMICHLPQVLRLHLKRFRWSGRNNREKIGVHVGFEEILNMEPYCCRETLKSLRPECFIYDLSAVVMHHGKGFGSGHYTAYCYNSEGGFWVHCNDSKLSMCTMDEVCKAQAYILFYTQRV

SEQ ID NO: 158 - protein, 337 aa, Homo sapiens
PALTGLRNLGNTCYMNSILQCLCNAPHLADYFNRNCYQDDINRSNLLGHKGEVAEEFGIIMKALWTGQYRYISPKDFKITIGKINDQFAGYSQQDSQELLLFLMDGLHEDLNKADNRKRYKEENNDHLDDFKAAEHAWQKHKQLNESIIVALFQGQFKSTVQCLTCHKKSRTFEAFMYLSLPLASTSKCTLQDCLRLFSKEEKLTDNNRFYCSHCRARRDSLKKIEIWKLPPVLLVHLKRFSYDGRWKQKLQTSVDFPLENLDLSQYVIGPKNNLKKYNLFSVSNHYGGLDGGHYTAYCKNAARQRWFKFDDHEVSDISVSSVKSSAAYILFYTSLG

SEQ ID NO: 159 - protein, 614 aa, Homo sapiens
QQLQGFSNLGNTCYMNAILQSLFSLQSFANDLLKQGIPWKKIPLNALIRRFAHLLVKKDICNSETKKDLLKKVKNAISATAERFSGYMQNDAHEFLSQCLDQLKEDMEKLNKTWKTEPVSGEENSPDISATRAYTCPVITNLEFEVQHSIICKACGEIIPKREQFNDLSIDLPRRKKPLPPRSIQDSLDLFFRAEELEYSCEKCGGKCALVRHKFNRLPRVLILHLKRYSFNVALSLNNKIGQQVIIPRYLTLSSHCTENTKPPFTLGWSAHMAISRPLKASQMVNSCITSPSTPSKKFTFKSKSSLALCLDSDSEDELKRSVALSQRLCEMLGNEQQQEDLEKDSKLCPIEPDKSELENSGFDRMSEEELLAAVLEISKRDASPSLSHEDDDKPTSSPDTGFAEDDIQEMPENPDTMETEKPKTITELDPASFTEITKDCDENKENKTPEGSQGEVDWLQQYDMEREREEQELQQALAQSLQEQEAWEQKEDDDLKRATELSLQEFNNSFVDALGSDEDSGNEDVFDMEYTEAEAEELKRNAETGNLPHSYRLISVVSHIGSTSSSGHYISDVYDIKKQAWFTYNDLEVSKIQEAAVQSDRDRSGYIFFYMHK

SEQ ID NO: 160 - protein, 300 aa, Homo sapiens
AVGAGLQNMGNTCYVNASLQCLTYTPPLANYMLSREHSQTCHRHKGCMLCTMQAHITRALHNPGHVIQPSQALAAGFHRGKQEDAHEFLMFTVDAMKKACLPGHKQVDHPSKDTTLIHQIFGGYWRSQIKCLHCHGISDTFDPYLDIALDIQAAQSVQQALEQLVKPEELNGENAYHCGVCLQRAPASKTLTLHTSAKVLILVLKRFSDVTGNKIAKNVQYPECLDMQPYMSQQNTGPLVYVLYAVLVHAGWSCHNGHYFSYVKAQEGQWYKMDDAEVTAASITSVLSQQAYVLFYIQKS

SEQ ID NO: 161 - protein, 300 aa, Homo sapiens
AVGAGLQNMGNTCYENASLQCLTYTLPLANYMLSREHSQTCQRPKCCMLCTMQAHITWALHSPGHVIQPSQALASGFHRGKQEDVHEFLMFTVDAMKKACLPGHKQVDHHSKDTTLIHQIFGGCWRSQIKCLHCHGISDTFDPYLDIALDIQAAQSVKQALEQLVKPEELNGENAYHCGLCLQRAPASNTLTLHTSAKVLILVLKRFSDVAGNKLAKNVQYPECLDMQPYMSQQNTGPLVYVLYAVLVHAGWSCHDGHYFSYVKAQEGQWYKMDDAEVTVCSITSVLSQQAYVLFYIQKS

SEQ ID NO: 162 - protein, 402 aa, Homo sapiens
APSKGLSNEPGQNSCFLNSALQVLWHLDIFRRSFRQLTTHKCMGDSCIFCALKGIFNQFQCSSEKVLPSDTLRSALAKTFQDEQRFQLGIMDDAAECFENLLMRIHFHIADETKEDICTAQHCISHQKFAMTLFEQCVCTSCGATSDPLPFIQMVHYISTTSLCNQAICMLERREKPSPSMFGELLQNASTMGDLRNCPSNCGERIRIRRVLMNAPQIITIGLVWDSDHSDLAEDVIHSLGTCLKLGDLFFRVTDDRAKQSELYLVGMICYYGKHYSTFFFQTKIRKWMYFDDAHVKEIGPKWKDVVTKCIKGHYQPLLLLYADPQGTPVSTQDLPPQAEFQSYSRTCYDSEDSGREPSISSDTRTDSSTESYPYKHSHHESVVSHFSSDSQGTVIYNVEND

SEQ ID NO: 163 - protein, 336 aa, Homo sapiens
LPGIVGLNNIKANDYANAVLQALSNVPPLRNYFLEEDNYKNIKRPPGDIMFLLVQRFGELMRKLWNPRNFKAHVSPHEMLQAVVLCSKKTFQITKQGDGVDFLSWFLNALHSALGGTKKKKKTIVTDVFQGSMRIFTKKLPHPDLPAEEKEQLLHNDEYQETMVESTFMYLTLDLPTAPLYKDEKEQLIIPQVPLFNILAKFNGITEKEYKTYKENFLKRFQLTKLPPYLIFCIKRFTKNNFFVEKNPTIVNFPITNVDLREYLSEEVQAVHKNTTYDLIANIVHDGKPSEGSYRIHVLHHGTGKWYELQDLQVTDILPQMITLSEAYIQIWKRRD

SEQ ID NO: 164 - protein, 492 aa, Homo sapiens
SDTGKIGLINLGNTCYVNSILQALFMASDFRHCVLRLTENNSQPLMTKLQWLFGFLEHSQRPAISPENFLSASWTPWFSPGTQQDCSEYLKYLLDRLHEEEKTGTRICQKLKQSSSPSPPEEPPAPSSTSVEKMFGGKIVTRICCLCCLNVSSREEAFTDLSLAFPPPERCRRRRLGSVMRPTEDITARELPPPTSAQGPGRVGPRRQRKHCITEDTPPTSLYIEGLDSKEAGGQSSQEERIEREEEGKEERTEKEEVGEEEESTRGEGEREKEEEVEEEEEKVEKETEKEAEQEKEEDSLGAGTHPDAAIPSGERTCGSEGSRSVLDLVNYFLSPEKLTAENRYYCESCASLQDAEKVVELSQGPCYLILTLLRFSFDLRTMRRRKILDDVSIPLLLRLPLAGGRGQAYDLCSVVVHSGVSSESGHYYCYAREGAARPAASLGTADRPEPENQWYLFNDTRVSFSSFESVSNVTSFFPKDTAYVLFYRQRP

SEQ ID NO: 165 - protein, 651 aa, Homo sapiens
EQPGLCGLSNLGNTCFMNSAIQCLSNTPPLTEYFLNDKYQEELNFDNPLGMRGEIAKSYAELIKQMWSGKFSYVTPRAFKTQVGRFAPQFSGYQQQDCQELLAFLLDGLHEDLNRIRKKPYIQLKDADGRPDKVVAEEAWENHLKRNDSIIVDIFHGLFKSTLVCPECAKISVTFDPFCYLTLPLPMKKERTLEVYLVRMDPLTKPMQYKVVVPKIGNILDLCTALSALSGIPADKMIVTDIYNHRFHRIFAMDENLSSIMERDDIYVFEININRTEDTEHVIIPVCLREKFRHSSYTHHTGSSLFGQPFLMAVPRNNTEDKLYNLLLLRMCRYVKISTETEETEGSLHCCKDQNINGNGPNGIHEEGSPSEMETDEPDDESSQDQELPSENENSQSEDSVGGDNDSENGLCTEDTCKGQLTGHKKRLFTFQFNNLGNTDINYIKDDTRHIRFDDRQLRLDERSFLALDWDPDLKKRYFDENAAEDFEKHESVEYKPPKKPFVKLKDCIELFTTKEKLGAEDPWYCPNCKEHQQATKKLDLWSLPPVLVVHLKRFSYSRYMRDKLDTLVDFPINDLDMSEFLINPNAGPCRYNLIAVSNHYGGMGGGHYTAFAKNKDDGKWYYFDDSSVSTASEDQIVSKAAYVLFYQRQD

SEQ ID NO: 166 - protein, 604 aa, Homo sapiens
QLQQGFPNLGNTCYMNAVLQSLFAIPSFADDLLTQGVPWEYIPFEALIMTLTQLLALKDFCSTKIKRELLGNVKKVISAVAEIFSGNMQNDAHEFLGQCLDQLKEDMEKLNATLNTGKECGDENSSPQMHVGSAATKVFVCPVVANFEFELQLSLICKACGHAVLKVEPNNYLSINLHQETKPLPLSIQNSLDLFFKEEELEYNCQMCKQKSCVARHTFSRLSRVLIIHLKRYSFNNAWLLVKNNEQVYIPKSLSLSSYCNESTKPPLPLSSSAPVGKCEVLEVSQEMISEINSPLTPSMKLTSESSDSLVLPVEPDKNADLQRFQRDCGDASQEQHQRDLENGSALESELVHFRDRAIGEKELPVADSLMDQGDISLPVMYEDGGKLISSPDTRLVEVHLQEVPQHPELQKYEKTNTFVEFNFDSVTESTNGFYDCKENRIPEGSQGMAEQLQQCIEESIIDEFLQQAPPPGVRKLDAQEHTEETLNQSTELRLQKADLNHLGALGSDNPGNKNILDAENTRGEAKELTRNVKMGDPLQAYRLISVVSHIGSSPNSGHYISDVYDFQKQAWFTYNDLCVSEISETKMQEARLHSGYIFFYMHN

SEQ ID NO: 167 - protein, 841 aa, Homo sapiens
KGATGLSNLGNTCFMNSSIQCVSNTQPLTQYFISGRHLYELNRTNPIGMKGHMAKCYGDLVQELWSGTQKSVAPLKLRRTIAKYAPKFDGFQQQDSQELLAFLLDGLHEDLNRVHEKPYVELKDSDGRPDWEVAAEAWDNHLRRNRSIIVDLFHGQLRSQVKCKTCGHISVRFDPNFLSLPLPMDSYMDLEITVIKLDGTTPVRYGLRLNMDEKYTGLKKQLRDLCGLNSEQILLAEVHDSNIKNFPQDNQKVQLSVSGFLCAFEIPVPSSPISASSPTQIDFSSSPSTNGMFTLTTNGDLPKPIFIPNGMPNTVVPCGTEKNFTNGMVNGHMPSLPDSPFTGYIIAVHRKMMRTELYFLSPQENRPSLFGMPLIVPCTVHTRKKDLYDAVWIQVSWLARPLPPQEASIHAQDRDNCMGYQYPFTLRVVQKDGNSCAWCPQYRFCRGCKIDCGEDRAFIGNAYIAVDWHPTALHLRYQTSQERVVDKHESVEQSRRAQAEPINLDSCLRAFTSEEELGESEMYYCSKCKTHCLATKKLDLWRLPPFLIIHLKRFQFVNDQWIKSQKIVRFLRESFDPSAFLVPRDPALCQHKPLTPQGDELSKPRILAREVKKVDAQSSAGKEDMLLSKSPSSLSANISSSPKGSPSSSRKSGTSCPSSKNSSPNSSPRTLGRSKGRLRLPQIGSKNKPSSSKKNLDASKENGAGQICELADALSRGHMRGGSQPELVTPQDHEVALANGFLYEHEACGNGCGDGYSNGQLGNHSEEDSTDDQREDTHIKPIYNLYAISCHSGILSGGHYITYAKNPNCKWYCYNDSSCEELHPDEIDTDSAYILFYEQQG

SEQ ID NO: 168 - protein, 446 aa, Homo sapiens
APTKGLLNEPGQNSCFLNSAVQVLWQLDIFRRSLRVLTGHVCQGDACIFCALKTIFAQFQHSREKALPSDNIRHALAESFKDEQRFQLGLMDDAAECFENMLERIHFHIVPSRDADMCTSKSCITHQKFAMTLYEQCVCRSCGASSDPLPFTEFVRYISTTALCNEVERMLERHERFKPEMFAELLQAANTTDDYRKCPSNCGQKIKIRRVLMNCPEIVTIGLVWDSEHSDLTEAVVRNLATHLYLPGLFYRVTDENAKNSELNLVGMICYTSQHYCAFAFHTKSSKWVFFDDANVKEIGTRWKDVVSKCIRCHFQPLLLFYANPDGTAVSTEDALRQVISWSHYKSVAENMGCEKPVIHKSDNLKENGFGDQAKQRENQKFPTDNISSSNRSHSHTGVGKGPAKLSHIDQREKIKDISRECALKAIEQKNLLSSQRKDLEKGQRK

SEQ ID NO: 169 - protein, 600 aa, Homo sapiens
AVGAGLQNMGNTCYVNASLQCLTYTPPLANYMLSREHSQTCHRHKGCMLCTMQAHITRALHNPGHVIQPSQALAAGFHRGKQEDAHEFLMFTVDAMKKACLPGHKQVDHHSKDTTLIHQIFGGYWRSQIKCLHCHGISDTFDPYLDIALDIQAAQSVQQALEQLVKPEELNGENAYHCGVCLQRAPASKTLTLHTSAKVLILVLKRFSDVTGNKIAKNVQYPECLDMQPYMSQPNTGPLVYVLYAVLVHAGWSCHNGHYFSYVKAQEGQWYKMDDAEVTASSITSVLSQQAYVLFYIQKSAVGAGLQNMGNTCYVNASLQCLTYTPPLANYMLSREHSQTCHRHKGCMLCTMQAHITRALHNPGHVIQPSQALAAGFHRGKQEDAHEFLMFTVDAMKKACLPGHKQVDHHSKDTTLIHQIFGGYWRSQIKCLHCHGISDTFDPYLDIALDIQAAQSVQQALEQLVKPEELNGENAYHCGVCLQRAPASKTLTLHTSAKVLILVLKRFSDVTGNKIAKNVQYPECLDMQPYMSQQNTGPLVYVLYAVLVHAGWSCHNGHYFSYVKAQEGQWYKMDDAEVTASSITSVLSQQAYVLFYIQKS

SEQ ID NO: 170 - protein, 1020 aa, Homo sapiens
FGPGYTGIRNLGNSCYLNSVVQVLFSIPDFQRKYVDKLEKIFQNAPTDPTQDFSTQVAKLGHGLLSGEYSKPVPESGDGERVPEQKEVQDGIAPRMFKALIGKGHPEFSTNRQQDAQEFFLHLINMVERNCRSSENPNEVFRFLVEEKIKCLATEKVKYTQRVDYIMQLPVPMDAALNKEELLEYEEKKRQAEEEKMALPELVRAQVPFSSCLEAYGAPEQVDDFWSTALQAKSVAVKTTRFASFPDYLVIQIKKFTFGLDWVPKKLDVSIEMPEELDISQLRGTGLQPGEEELPDIAPPLVTPDEPKGSLGFYGNEDEDSFCSPHFSSPTSPMLDESVIIQLVEMGFPMDACRKAVYYTGNSGAEAAMNWVMSHMDDPDFANPLILPGSSGPGSTSAAADPPPEDCVTTIVSMGFSRDQALKALRATNNSLERAVDWIFSHIDDLDAEAAMDISEGRSAADSISESVPVGPKVRDGPGKYQLFAFISHMGTSTMCGHYVCHIKKEGRWVIYNDQKVCASEKPPKDLGYIYFYQRVAKAPVGLKNVGNTCWFSAVIQSLFNLLEFRRLVLNYKPPSNAQDLPRNQKEHRNLPFMRELRYLFALLVGTKRKYVDPSRAVEILKDAFKSNDSQQQDVSEFTHKLLDWLEDAFQMKAEEETDEEKPKNPMVELFYGRFLAVGVLEGKKFENTEMFGQYPLQVNGFKDLHECLEAAMIEGEIESLHSENSGKSGQEHWFTELPPVLTFELSRFEFNQALGRPEKIHNKLEFPQVLYLDRYMHRNREITRIKREEIKRLKDYLTVLQQRLERYLSYGSGPKRFPLVDVLQYALEFASSKPVCTSPVDDIDASSPPSGSIPSQTLPSTTEQQGALSSELPSTSPSSVAAISSRSVIHKPFTQSRIPPDLPMHPAPRHITEEELSVLESCLHRWRTEIENDTRDLQESISRIHRTIELMYSDKSMIQVPYRLHAVLVHEGQANAGHYWAYIFDHRESRWMKYNDIAVTKSSWEELVRDSFGGYRNAS

SEQ ID NO: 171 - protein, 536 aa, Homo sapiens
ARGLTGLKNIGNTCYMNAALQALSNCPPLTQFFLDCGGLARTDKKPAICKSYLKLMTELWHKSRPGSVVPTTLFQGIKTVNPTFRGYSQQDAQEFLRCLMDLLHEELKEQVMEVEEDPQTITTEETMEEDKSQSDVDFQSCESCSNSDRAENENGSRCFSEDNNETTMLIQDDENNSEMSKDWQKEKMCNKINKVNSEGEFDKDRDSISETVDLNNQETVKVQIHSRASEYITDVHSNDLSTPQILPSNEGVNPRLSASPPKSGNLWPGLAPPHKKAQSASPKRKKQHKKYRSVISDIFDGTIISSVQCLTCDRVSVTLETFQDLSLPIPGKEDLAKLHSSSHPTSIVKAGSCGEAYAPQGWIAFFMEYVKRFVVSCVPSWFWGPVVTLQDCLAAFFARDELKGDNMYSCEKCKKLRNGVKFCKVQNFPEILCIHLKRFRHELMFSTKISTHVSFPLEGLDLQPFLAKDSPAQIVTYDLLSVICHHGTASSGHYIAYCRNNLNNLWYEFDDQSVTEVSESTVQNAEAYVLFYRKSS

SEQ ID NO: 172 - protein, 353 aa, Homo sapiens
LGSGHVGLRNLGNTCFLNAVLQCLSSTRPLRDFCLRRDFRQEVPGGGRAQELTEAFADVIGALWHPDSCEAVNPTRFRAVFQKYVPSFSGYSQQDAQEFLKLLMERLHLEINRRGRRAPPILANGPVPSPPRRGGALLEEPELSDDDRANLMWKRYLEREDSKIVDLFVGQLKSCLKCQACGYRSTTFEVFCDLSLPIPKKGFAGGKVSLRDCFNLFTKEEELESENAPVCDRCRQKTRSTKKLTVQRFPRILVLHLNRFSASRGSIKKSSVGVDFPLQRLSLGDFASDKAGSPVYQLYALCNHSGSVHYGHYTALCRCQTGWHVYNDSRVSPVSENQVASSEGYVLFYQLMQ

SEQ ID NO: 173 - protein, 300 aa, Homo sapiens
AVGAGLQNMGNTCYENASLQCLTYTLPLANYMLSREHSQTCQRPKCCMLCTMQAHITWALHSPGHVIQPSQALAAGFHRGKQEDVHEFLMFTVDAMKKACLPGHKQVDHHSKDTTLIHQIFGGCWRSQIKCLHCHGISDTFDPYLDIALDIQAAQSVKQALEQLVKPEELNGENAYHCGLCLQRAPASNTLTLHTSAKVLILVLKRFSDVAGNKLAKNVQYPECLDMQPYMSQQNTGPLVYVLYAVLVHAGWSCHDGYYFSYVKAQEGQWYKMDDAEVTVCSITSVLSQQAYVLFYIQKS

SEQ ID NO: 174 - protein, 300 aa, Homo sapiens
AVGAGLQNMGNTCYVNASLQCLTYTPPLANYMLSREHSQTCHRHKGCMLCTMQAHITRALHNPGHVIQPSQALAAGFHRGKQEDAHEFLMFTVDAMKKACLPGHKQVDHHSKDTTLIHQIFGGYWRSQIKCLHCHGISDTFDPYLDIALDIQAAQSVQQALEQLVKPEELNGENAYHCGVCLQRAPASKTLTLHTSAKVLILVLKRFSDVTGNKIAKNVQYPECLDMQPYMSQPNTGPLVYVLYAVLVHAGWSCHNGHYFSYVKAQEGQWYKMDDAEVTASSITSVLSQQAYVLFYIQKS

SEQ ID NO: 175 - protein, 334 aa, Homo sapiens
EHYFGLVNFGNTCYCNSVLQALYFCRPFREKVLAYKSQPRKKESLLTCLADLFHSIATQKKKVGVIPPKKFITRLRKENELFDNYMQQDAHEFLNYLLNTIADILQEERKQEKQNGRLPNGNIDNENNNSTPDPTWVHEIFQGTLTNETRCLTCETISSKDEDFLDLSVDVEQNTSITHCLRGFSNTETLCSEYKYYCEECRSKQEAHKRMKVKKLPMILALHLKRFKYMDQLHRYTKLSYRVVFPLELRLFNTSGDATNPDRMYDLVAVVVHCGSGPNRGHYIAIVKSHDFWLLFDDDIVEKIDAQAIEEFYGLTSDISKNSESGYILFYQSR

SEQ ID NO: 176 - protein, 300 aa, Homo sapiens
AVGAGLQNMGNTCYVNASLQCLTYTPPLANYMLSREHSQTCHRHKGCMLCTMQAHITRALHNPGHVIQPSQALAAGFHRGKQEDAHEFLMFTVDAMKKACLPGHKQVDHHSKDTTLIHQIFGGYWRSQIKCLHCHGISDTFDPYLDIALDIQAAQSVQQALEQLVKPEELNGENAYHCGVCLQRAPASKMLTLLTSAKVLILVLKRFSDVTGNKIAKNVQYPECLDMQPYMSQPNTGPLVYVLYAVLVHAGWSCHNGHYFSYVKAQEGQWYKMDDAEVTASSITSVLSQQAYVLFYIQKS

SEQ ID NO: 177 - protein, 546 aa, Homo sapiens
PRGLTGMKNLGNSCYMNAALQALSNCPPLTQFFLECGGLVRTDKKPALCKSYQKLVSEVWHKKRPSYVVPTSLSHGIKLVNPMFRGYAQQDTQEFLRCLMDQLHEELKEPVVATVALTEARDSDSSDTDEKREGDRSPSEDEFLSCDSSSDRGEGDGQGRGGGSSQAETELLIPDEAGRAISEKERMKDRKFSWGQQRTNSEQVDEDADVDTAMAALDDQPAEAQPPSPRSSSPCRTPEPDNDAHLRSSSRPCSPVHHHEGHAKLSSSPPRASPVRMAPSYVLKKAQVLSAGSRRRKEQRYRSVISDIFDGSILSLVQCLTCDRVSTTVETFQDLSLPIPGKEDLAKLHSAIYQNVPAKPGACGDSYAAQGWLAFIVEYIRRFVVSCTPSWFWGPVVTLEDCLAAFFAADELKGDNMYSCERCKKLRNGVKYCKVLRLPEILCIHLKRFRHEVMYSFKINSHVSFPLEGLDLRPFLAKECTSQITTYDLLSVICHHGTAGSGHYIAYCQNVINGQWYEFDDQYVTEVHETVVQNAEGYVLFYRKSS

SEQ ID NO: 178 - protein, 334 aa, Homo sapiens
EHYFGLVNFGNTCYCNSVLQALYFCRPFRENVLAYKAQQKKKENLLTCLADLFHSIATQKKKVGVIPPKKFISRLRKENDLFDNYMQQDAHEFLNYLLNTIADILQEEKKQEKQNGKLKNGNMNEPAENNKPELTWVHEIFQGTLTNETRCLNCETVSSKDEDFLDLSVDVEQNTSITHCLRDFSNTETLCSEQKYYCETCCSKQEAQKRMRVKKLPMILALHLKRFKYMEQLHRYTKLSYRVVFPLELRLFNTSSDAVNLDRMYDLVAVVVHCGSGPNRGHYITIVKSHGFWLLFDDDIVEKIDAQAIEEFYGLTSDISKNSESGYILFYQSR

SEQ ID NO: 179 - protein, 363 aa, Homo sapiens
GKKKGIQGHYNSCYLDSTLFCLFAFSSVLDTVLLRPKEKNDVEYYSETQELLRTEIVNPLRIYGYVCATKIMKLRKILEKVEAASGFTSEEKDPEEFLNILFHHILRVEPLLKIRSAGQKVQDCYFYQIFMEKNEKVGVPTIQQLLEWSFINSNLKFAEAPSCLIIQMPRFGKDFKLFKKIFPSLELNITDLLEDTPRQCRICGGLAMYECRECYDDPDISAGKIKQFCKTCNTQVHLHPKRLNHKYNPVSLPKDLPDWDWRHGCIPCQNMELFAVLCIETSHYVAFVKYGKDDSAWLFFDSMADRDGGQNGFNIPQVTPCPEVGEYLKMSLEDLHSLDSRRIQGCARRLLCDAYMCMYQSPT

SEQ ID NO: 180 - protein, 631 aa, Homo sapiens
ITVKGLSNLGNTCFFNAVMQNLSQTPVLRELLKEVKMSGTIVKIEPPDLALTEPLEINLEPPGPLTLAMSQFLNEMQETKKGVVTPKELFSQVCKKAVRFKGYQQQDSQELLRYLLDGMRAEEHQRVSKGILKAFGNSTEKLDEELKNKVKDYEKKKSMPSFVDRIFGGELTSMIMCDQCRTVSLVHESFLDLSLPVLDDQSGKKSVNDKNLKKTVEDEDQDSEEEKDNDSYIKERSDIPSGTSKHLQKKAKKQAKKQAKNQRRQQKIQGKVLHLNDICTIDHPEDSEYEAEMSLQGEVNIKSNHISQEGVMHKEYCVNQKDLNGQAKMIESVTDNQKSTEEVDMKNINMDNDLEVLTSSPTRNLNGAYLTEGSNGEVDISNGFKNLNLNAALHPDEINIEILNDSHTPGTKVYEVVNEDPETAFCTLANREVFNTDECSIQHCLYQFTRNEKLRDANKLLCEVCTRRQCNGPKANIKGERKHVYTNAKKQMLISLAPPVLTLHLKRFQQAGFNLRKVNKHIKFPEILDLAPFCTLKCKNVAEENTRVLYSLYGVVEHSGTMRSGHYTAYAKARTANSHLSNLVLHGDIPQDFEMESKGQWFHISDTHVQAVPTTKVLNSQAYLLFYERIL

SEQ ID NO: 181 - protein, 291 aa, Homo sapiens
YRYKDSLKEDIQKADLVISHAGAGSCLETLEKGKPLVVVINEKLMNNHQLELAKQLHKEGHLFYCTCRVLTCPGQAKSIASAPGKCQDSAALTSTAFSGLDFGLLSGYLHKQALVTATHPTCTLLFPSCHAFFPLPLTPTLYKMHKGWKNYCSQKSLNEASMDEYLGSLGLFRKLTAKDASCLFRAISEQLFCSQVHHLEIRKACVSYMRENQQTFESYVEGSFEKYLERLGDPKESAGQLEIRALSLIYNRDFILYRFPGKPPTYVTDNGYEDKILLCYSSSGHYDSVYS

SEQ ID NO: 182 - protein, 212 aa, Homo sapiens
QGLSSRTRVRELQGQIAAITGIAPGGQRILVGYPPECLDLSNGDTILEDLPIQSGDMLIIEEDQTRPRSSPAFTKRGASSYVRETLPVLTRTVVPADNSCLFTSVYYVVEGGVLNPACAPEMRRLIAQIVASDPDFYSEAILGKTNQEYCDWIKRDDTWGGAIEISILSKFYQCEICVVDTQTVRIDRFGEDAGYTKRVLLIYDGIHYDPLQ

SEQ ID NO: 183 - protein, 375 aa, Homo sapiens
HREAAAVPAAKMPAFSSCFEVVSGAAAPASAAAGPPGASCKPPLPPHYTSTAQITVRALGADRLLLHGPDPVPGAAGSAAAPRGRCLLLAPAPAAPVPPRRGSSAWLLEELLRPDCPEPAGLDATREGPDRNFRLSEHRQALAAAKHRGPAATPGSPDPGPGPWGEEHLAERGPRGWERGGDRCDAPGGDAARRPDPEAEAPPAGSIEAAPSSAAEPVIVSRSDPRDEKLALYLAEVEKQDKYLRQRNKYRFHIIPDGNCLYRAVSKTVYGDQSLHRELREQTVHYIADHLDHFSPLIEGDVGEFIIAAAQDGAWAGYPELLAMGQMLNVNIHLTTGGRLESPTVSTMIHYLGPEDSLRPSIWLSWLSNGHYDAV

SEQ ID NO: 184 - protein, 213 aa, Homo sapiens
QKHREELEQLKLTTKENKIDSVAVNISNLVLENQPPRISKAQKRREKKAALEKEREERIAEAEIENLTGARHMESEKLAQILAARQLEIKQIPSDGHCMYKAIEDQLKEKDCALTVVALRSQTAEYMQSHVEDFLPFLTNPNTGDMYTPEEFQKYCEDIVNTAAWGGQLELRALSHILQTPIEIIQADSPPIIVGEEYSKKPLILVYMRHAYG

SEQ ID NO: 185 - protein, 204 aa, Homo sapiens
QELEKFQDDSSIESVVEDLAKMNLENRPPRSSKAHRKRERMESEERERQESIFQAEMSEHLAGFKREEEEKLAAILGARGLEMKAIPADGHCMYRAIQDQLVFSVSVEMLRCRTASYMKKHVDEFLPFFSNPETSDSFGYDDFMIYCDNIVRTTAWGGQLELRALSHVLKTPIEVIQADSPTLIIGEEYVKKPIILVYLRYAYS

SEQ ID NO: 186 - protein, 311 aa, Homo sapiens
SDYEQLRQVHTANLPHVFNEGRGPKQPEREPQPGHKVERPCLQRQDDIAQEKRLSRGISHASSAIVSLARSHVASECNNEQFPLEMPIYTFQLPDLSVYSEDFRSFIERDLIEQATMVALEQAGRLNWWSTVCTSCKRLLPLATTGDGNCLLHAASLGMWGFHDRDLVLRKALYTMMRTGAEREALKRRWRWQQTQQNKEEEWEREWTELLKLASSEPRTHFSKNGGTGGGVDNSEDPVYESLEEFHVFVLAHILRRPIVVVADTMLRDSGGEAFAPIPFGGIYLPLEVPPNRCHCSPLVLAYDQAHFSAL

SEQ ID NO: 187 - protein, 154 aa, Homo sapiens
MEAAVGVPDGGDQGGAGPREDATPMDAYLRKLGLYRKLVAKDGSCLFRAVAEQVLHSQSRHVEVRMACIHYLRENREKFEAFIEGSFEEYLKRLENPQEWVGQVEISALSLMYRKDFIIYREPNVSPSQVTENNFPEKVLLCFSNGNHYDIVYP

SEQ ID NO: 188 - protein, 188 aa, Homo sapiens
MSRKQAAKSRPGSGSRKAEAERKRDERAARRALAKERRNRPESGGGGGCEEEFVSFANQLQALGLKLREVPGDGNCLFRALGDQLEGHSRNHLKHRQETVDYMIKQREDFEPFVEDDIPFEKHVASLAKPGTFAGNDAIVAFARNHQLNVVIHQLNAPLWQIRGTEKSSVRELHIAYRYGEHYDSVRR

SEQ ID NO: 189 - protein, 362 aa, Homo sapiens
MTLDMDAVLSDFVRSTGAEPGLARDLLEGKNWDVNAALSDFEQLRQVHAGNLPPSFSEGSGGSRTPEKGFSDREPTRPPRPILQRQDDIVQEKRLSRGISHASSSIVSLARSHVSSNGGGGGSNEHPLEMPICAFQLPDLTVYNEDFRSFIERDLIEQSMLVALEQAGRLNWWVSVDPTSQRLLPLATTGDGNCLLHAASLGMWGFHDRDLMLRKALYALMEKGVEKEALKRRWRWQQTQQNKESGLVYTEDEWQKEWNELIKLASSEPRMHLGTNGANCGGVESSEEPVYESLEEFHVFVLAHVLRRPIVVVADTMLRDSGGEAFAPIPFGGIYLPLEVPASQCHRSPLVLAYDQAHFSAL

SEQ ID NO: 190 - protein, 338 aa, Homo sapiens
MTILPKKKPPPPDADPANEPPPPGPMPPAPRRGGGVGVGGGGTGVGGGDRDRDSGVVGARPRASPPPQGPLPGPPGALHRWALAVPPGAVAGPRPQQASPPPCGGPGGPGGGPGDALGAAAAGVGAAGVVVGVGGAVGVGGCCSGPGHSKRRRQAPGVGAVGGGSPEREEVGAGYNSEDEYEAAAARIEAMDPATVEQQEHWFEKALRDKKGFIIKQMKEDGACLFRAVADQVYGDQDMHEVVRKHCMDYLMKNADYFSNYVTEDFTTYINRKRKNNCHGNHIEMQAMAEMYNRPVEVYQYSTGTSAVEPINTFHGIHQNEDEPIRVSYHRNIHYNSV

SEQ ID NO: 191 - protein, 260 aa, Homo sapiens
MAEQVLPQALYLSNMRKAVKIRERTPEDIFKPTNGIIHHFKTMHRYTLEMFRTCQFCPQFREIIHKALIDRNIQATLESQKKLNWCREVRKLVALKTNGDGNCLMHATSQYMWGVQDTDLVLRKALFSTLKETDTRNFKFRWQLESLKSQEFVETGLCYDTRNWNDEWDNLIKMASTDTPMARSGLQYNSLEEIHIFVLCNILRRPIIVISDKMLRSLESGSNFAPLKVGGIYLPLHWPAQECYRYPIVLGYDSHHFVPL

SEQ ID NO: 192 - protein, 589 aa, Homo sapiens
MSERGIKWACEYCTYENWPSAIKCTMCRAQRPSGTIITEDPFKSGSSDVGRDWDPSSTEGGSSPLICPDSSARPRVKSSYSMENANKWSCHMCTYLNWPRAIRCTQCLSQRRTRSPTESPQSSGSGSRPVAFSVDPCEEYNDRNKLNTRTQHWTCSVCTYENWAKAKRCVVCDHPRPNNIEAIELAETEEASSIINEQDRARWRGSCSSGNSQRRSPPATKRDSEVKMDFQRIELAGAVGSKEELEVDFKKLKQIKNRMKKTDWLFLNACVGVVEGDLAAIEAYKSSGGDIARQLTADEVRLLNRPSAFDVGYTLVHLAIRFQRQDMLAILLTEVSQQAAKCIPAMVCPELTEQIRREIAASLHQRKGDFACYFLTDLVTFTLPADIEDLPPTVQEKLFDEVLDRDVQKELEEESPIINWSLELATRLDSRLYALWNRTAGDCLLDSVLQATWGIYDKDSVLRKALHDSLHDCSHWFYTRWKDWESWYSQSFGLHFSLREEQWQEDWAFILSLASQPGASLEQTHIFVLAHILRRPIIVYGVKYYKSFRGETLGYTRFQGVYLPLLWEQSFCWKSPIALGYTRGHFSAL

SEQ ID NO: 193 - protein, 298 aa, Homo sapiens
PASGSVSIECTECGQRHEQQQLLGVEEVTDPDVVLHNLLRNALLGVTGAPKKNTELVKVMGLSNYHCKLLSPILARYGMDKQTGRAKLLRDMNQGELFDCALLGDRAFLIEPEHVNTVGYGKDRSGSLLYLHDTLEDIKRANKSQECLIPVHVDGDGHCLVHAVSRALVGRELFWHALRENLKQHFQQHLARYQALFHDFIDAAEWEDIINECDPLFVPPEGVPLGLRNIHIFGLANVLHRPIILLDSLSGMRSSGDYSATFLPGLIPAEKCTGKDGHLNKPICIAWSSSGRNHYIPL

SEQ ID NO: 194 - protein, 227 aa, Homo sapiens
QRWLPLEANPEVTNQFLKQLGLHPNWQFVDVYGMDPELLSMVPRPVCAVLLLFPITEKYEVFRTEEEEKIKSQGQDVTSSVYFMKQTISNACGTIGLIHAIANNKDKMHFESGSTLKKFLEESVSMSPEERARYLENYDAIRVTHETSAHEGQTEAPSIDEKVDLHFIALVHVDGHLYELDGRKPFPINHGETSDETLLEDAIEVCKKFMERDPDELRFNAIALSAA

SEQ ID NO: 195 - protein, 223 aa, Homo sapiens
GEWCLMESDPGVFTELIKGFGCRGAQVEEIWSLEPENFEKLKPVHGLIFLFKWQPGEEPAGSVVQDSRLDTIFFAKQVINNACATQAIVSVLLNCTHQDVHLGETLSEFKEFSQSFDAAMKGLALSNSDVIRQVHNSFARQQMFEFDTKTSAKEEDAFHFVSYVPVNGRLYELDGLREGPIDLGACNQDDWISAVRPVIEKRIQKYSEGEIRFNLMAIVSDRK

SEQ ID NO: 196 - protein, 165 aa, Homo sapiens
ESIFHEKQEGSLCAQHCLNNLLQGEYFSPVELSSIAHQLDEEERMRMAEGGVTSEDYRTFLQQPSGNMDDSGFFSIQVISNALKVWGLELILFNSPEYQRLRIDPINERSFICNYKEHWFTVRKLGKQWFNLNSLLTGPELISDTYLALFLAQLQQEGYSIFVVK

SEQ ID NO: 197 - protein, 163 aa, Homo sapiens
PTVYHERQRLELCAVHALNNVLQQQLFSQEAADEICKRLAPDSRLNPHRSLLGTGNYDVNVIMAALQGLGLAAVWWDRRRPLSQLALPQVLGLILNLPSPVSLGLLSLPLRRRHWVALRQVDGVYYNLDSKLRAPEALGDEDGVRAFLAAALAQGLCEVLLVV

SEQ ID NO: 198 - protein, 170 aa, Homo sapiens
PQAAPPQIYHEKQRRELCALHALNNVFQDSNAFTRDTLQEIFQRLSPNTMVTPHKKSMLGNGNYDVNVIMAALQTKGYEAVWWDKRRDVGVIALTNVMGFIMNLPSSLCWGPLKLPLKRQHWICVREVGGAYYNLDSKLKMPEWIGGESELRKFLKHHLRGKNCELLLVV

SEQ ID NO: 199 - protein, 165 aa, Homo sapiens
DFIFHEKQEGFLCAQHCLNNLLQGEYFSPVELASIAHQLDEEERMRMAEGGVTSEEYLAFLQQPSENMDDTGFFSIQVISNALKFWGLEIIHFNNPEYQKLGIDPINERSFICNYKQHWFTIRKFGKHWFNLNSLLAGPELISDTCLANFLARLQQQAYSVFVVK

SEQ ID NO: 200 - protein, 419 aa, Homo sapiens
CRWTQGFVFSESEGSALEQFEGGPCAVIAPVQAFLLKKLLFSSEKSSWRDCSEEEQKELLCHTLCDILESACCDHSGSYCLVSWLRGKTTEETASISGSPAESSCQVEHSSALAVEELGFERFHALIQKRSFRSLPELKDAVLDQYSMWGNKFGVLLFLYSVLLTKGIENIKNEIEDASEPLIDPVYGHGSQSLINLLLTGHAVSNVWDGDRECSGMKLLGIHEQAAVGFLTLMEALRYCKVGSYLKSPKFPIWIVGSETHLTVFFAKDMALVAPEAPSEQARRVFQTYDPEDNGFIPDSLLEDVMKALDLVSDPEYINLMKNKLDPEGLGIILLGPFLQEFFPDQGSSGPESFTVYHYNGLKQSNYNEKVMYVEGTAVVMGFEDPMLQTDDTPIKRCLQTKWPYIELLWTTDRSPSLN

SEQ ID NO: 201 - protein, 356 aa, Homo sapiens
YCVKWIPWKGEQTPIITQSTNGPCPLLAIMNILFLQWKVKLPPQKEVITSDELMAHLGNCLLSIKPQEKSEGLQLNFQQNVDDAMTVLPKLATGLDVNVRFTGVSDFEYTPECSVFDLLGIPLYHGWLVDPQSPEAVRAVGKLSYNQLVERIITCKHSSDTNLVTEGLIAEQFLETTAAQLTYHGLCELTAAAKEGELSVFFRNNHFSTMTKHKSHLYLLVTDQGFLQEEQVVWESLHNVDGDSCFCDSDFHLSHSLGKGPGAEGGSGSPETQLQVDQDYLIALSLQQQQPRGPLGLTDLELAQQLQQEEYQQQQAAQPVRMRTRVLSLQGRGATSGRPAGERRQRPKHESDCILL

SEQ ID NO: 202 - protein, 379 aa, Homo sapiens
YHIKWIQWKEENTPIITQNENGPCPLLAILNVLLLAWKVKLPPMMEIITAEQLMEYLGDYMLDAKPKEISEIQRLNYEQNMSDAMAILHKLQTGLDVNVRFTGVRVFEYTPECIVFDLLDIPLYHGWLVDPQIDDIVKAVGNCSYNQLVEKIISCKQSDNSELVSEGFVAEQFLNNTATQLTYHGLCELTSTVQEGELCVFFRNNHFSTMTKYKGQLYLLVTDQGFLTEEKVVWESLHNVDGDGNFCDSEFHLRPPSDPETVYKGQQDQIDQDYLMALSLQQEQQSQEINWEQIPEGISDLELAKKLQEEEDRRASQYYQEQEQAAAAAAAASTQAQQGQPAQASPSSGRQSGNSERKRKEPREKDKEKEKEKNSCVIL

SEQ ID NO: 203 - protein, 334 aa, Homo sapiens
FCCFNEEWKLQSFSFSNTASLKYGIVQNKGGPCGVLAAVQGCVLQKLLFEGDSKADCAQGLQPSDAHRTRCLVLALADIVWRAGGRERAVVALASRTQQFSPTGKYKADGVLETLTLHSLTCYEDLVTFLQQSIHQFEVGPYGCILLTLSAILSRSTELIRQDFDVPTSHLIGAHGYCTQELVNLLLTGKAVSNVFNDVVELDSGDGNITLLRGIAARSDIGFLSLFEHYNMCQVGCFLKTPRFPIWVVCSESHFSILFSLQPGLLRDWRTERLFDLYYYDGLANQQEQIRLTIDTTQTISEDTDNDLVPPLELCIRTKWKGASVNWNGSDPIL

SEQ ID NO: 204 - protein, 167 aa, Homo sapiens
VVPGRLCPQFLQLASANTARGVETCGILCGKLMRNEFTITHVLIPKQSAGSDYCNTENEEELFLIQDQQGLITLGWIHTHPTQTAFLSSVDLHTHCSYQMMLPESVAIVCSPKFQETGFFKLTDHGLEEISSCRQKGFHPHSKDPPLFCSCSHVTVVDRAVTITDLR

SEQ ID NO: 205 - protein, 200 aa, Homo sapiens
VAVSSNVLFLLDFHSHLTRSEVVGYLGGRWDVNSQMLTVLRAFPCRSRLGDAETAAAIEEEIYQSLFLRGLSLVGWYHSHPHSPALPSLQDIDAQMDYQLRLQGSSNGFQPCLALLCSPYYSGNPGPESKISPFWVMPPPEMLLVEFYKGSPDLVRLQEPWSQEHTYLDKLKISLASRTPKDQSLCHVLEQVCGVLKQGS

SEQ ID NO: 206 - protein, 201 aa, Homo sapiens
ALAYVKMCLHAARYPHAAVNGLFLAPAPRSGECLCLTDCVPLFHSHLALSVMLEVALNQVDVWGAQAGLVVAGYYHANAAVNDQSPGPLALKIAGRIAEFFPDAVLIMLDNQKLVPQPRVPPVIVLENQGLRWVPKDKNLVMWRDWEESRQMVGALLEDRAHQHLVDFDCHLDDIRQDWTNQRLNTQITQWVGPTNGNGNA

SEQ ID NO: 207 - protein, 281 aa, Homo sapiens
QVYISSLALLKMLKHGRAGVPMEVMGLMLGEFVDDYTVRVIDVFAMPQSGTGVSVEAVDPVFQAKMLDMLKQTGRPEMVVGWYHSHPGFGCWLSGVDINTQQSFEALSERAVAVVVDPIQSVKGKVVIDAFRLINANMMVLGHEPRQTTSNLGHLNKPSIQALIHGLNRHYYSITINYRKNELEQKMLLNLHKKSWMEGLTLQDYSEHCKHNESVVKEMLELAKNYNKAVEEEDKMTPEQLAIKNVGKQDPKRHLEEHVDVLMTSNIVQCLAAMLDTVVFK

SEQ ID NO: 208 - protein, 253 aa, Homo sapiens
QVKVASEALLIMDLHAHVSMAEVIGLLGGRYSEVDKVVEVCAAEPCNSLSTGLQCEMDPVSQTQASETLAVRGFSVIGWYHSHPAFDPNPSLRDIDTQAKYQSYFSRGGAKFIGMIVSPYNRNNPLPYSQITCLVISEEISPDGSYRLPYKFEVQQMLEEPQWGLVFEKTRWIIEKYRLSHSSVPMDKIFRRDSDLTCLQKLLECMRKTLSKVTNCFMAEEFLTEIENLFLSNYKSNQENGVTEENCTKELLM

SEQ ID NO: 209 - protein, 404 aa, Homo sapiens
AVCFHSANSNADHEGFLLGEVRQEETFSISDSQISNTEFLQVIEIHNHQPCSKLFSFYDYASKVNEESLDRILKDRRKKVIGWYRFRRNTQQQMSYREQVLHKQLTRILGVPDLVFLLFSFISTANNSTHALEYVLFRPNRRYNQRISLAIPNLGNTSQQEYKVSSVPNTSQSYAKVIKEHGTDFFDKDGVMKDIRAIYQVYNALQEKVQAVCADVEKSERVVESCQAEVNKLRRQITQRKNEKEQERRLQQAVLSRQMPSESLDPAFSPRMPSSGFAAEGRSTLGDAEASDPPPPYSDFHPNNQESTLSHSRMERSVFMPRPQAVGSSNYASTSAGLKYPGSGADLPPPQRAAGDSGEDSDDSDYENLIDPTEPSNSEYSHSKDSRPMAHPDEDPRNTQTSQI

SEQ ID NO: 210 - protein, 526 aa, Homo sapiens
FNPRTGQLFLKIIHTSVWAGQKRLGQLAKWKTAEEVAALIRSLPVEEQPKQIIVTRKGMLDPLEVHLLDFPNIVIKGSELQLPFQACLKVEKFGDLILKATEPQMVLFNLYDDWLKTISSYTAFSRLILILRALHVNNDRAKVILKPDKTTITEPHHIWPTLTDEEWIKVEVQLKDLILADYGKKNNVNVASLTQSEIRDIILGMEISAPSQQRQQIAEIEKQTKEQSQLTATQTRTVNKHGDEIITSTTSNYETQTFSSKTEWRVRAISAANLHLRTNHIYVSSDDIKETGYTYILPKNVLKKFICISDLRAQIAGYLYGVSPPDNPQVKEIRCIVMVPQWGTHQTVHLPGQLPQHEYLKEMEPLGWIHTQPNESPQLSPQDVTTHAKIMADNPSWDGEKTIIITCSFTPGSCTLTAYKLTPSGYEWGRQNTDKGNNPKGYLPSHYERVQMLLSDRFLGFFMVPAQSSWNYNFMGVRHDPNMKYELQLANPKEFYHEVHRPSHFLNFALLQEGEVYSADREDLYA

SEQ ID NO: 211 - protein, 400 aa, Homo sapiens
QPSAITLNRQKYRHVDNIMFENHTVADRFLDFWRKTGNQHFGYLYGRYTEHKDIPLGIRAEVAAIYEPPQIGTQNSLELLEDPKAEVVDEIAAKLGLRKVGWIFTDLVSEDTRKGTVRYSRNKDTYFLSSEECITAGDFQNKHPNMCRLSPDGHFGSKFVTAVATGGPDNQVHFEGYQVSNQCMALVRDECLLPCKDAPELGYAKESSSEQYVPDVFYKDVDKFGNEITQLARPLPVEYLIIDITTTFPKDPVYTFSISQNPFPIENRDVLGETQDFHSLATYLSQNTSSVFLDTISDFHLLLFLVTNEVMPLQDSISLLLEAVRTRNEELAQTWKRSEQWATIEQLCSTVGGQLPGLHEYGAVGGSTHTATAAMWACQHCTFMNQPGTGHCEMCSLPRT

SEQ ID NO: 212 - protein, 203 aa, Homo sapiens
TQAYCKMVLHGAKYPHCAVNGLLVAEKQKPRKEHLPLGGPGAHHTLFVDCIPLFHGTLALAPMLEVALTLIDSWCKDHSYVIAGYYQANERVKDASPNQVAEKVASRIAEGFSDTALIMVDNTKFTMDCVAPTIHVYEHHENRWRCRDPHHDYCEDWPEAQRISASLLDSRSYETLVDFDNHLDDIRNDWTNPEINKAVLHLC

SEQ ID NO: 213 - protein, 398 aa, Homo sapiens
GFVLGALAFQHLNTDSDTEGFLLGEVKGEAKNSITDSQMDDVEVVYTIDIQKYIPCYQLFSFYNSSGEVNEQALKKILSNVKKNVVGWYKFRRHSDQIMTFRERLLHKNLQEHFSNQDLVFLLLTPSIITESCSTHRLEHSLYKPQKGLFHRVPLVVANLGMSEQLGYKTVSGSCMSTGFSRAVQTHSSKFFEEDGSLKEVHKINEMYASLQEELKSICKKVEDSEQAVDKLVKDVNRLKREIEKRRGAQIQAAREKNIQKDPQENIFLCQALRTFFPNSEFLHSCVMSLKNRHVSKSSCNYNHHLDVVDNLTLMVEHTDIPEASPASTPQIIKHKALDLDDRWQFKRSRLLDTQDKRSKADTGSSNQDKASKMSSPETDEEIEKMKGFGEYSRSPTF

SEQ ID NO: 214 - protein, 168 aa, Homo sapiens
VVLPEDLCHKFLQLAESNTVRGIETCGILCGKLTHNEFTITHVIVPKQSAGPDYCDMENVEELFNVQDQHDLLTLGWIHTHPTQTAFLSSVDLHTHCSYQLMLPEAIAIVCSPKHKDTGIFRLTNAGMLEVSACKKKGFHPHTKEPRLFSICKHVLVKDIKIIVLDLR

SEQ ID NO: 215 - protein, 287 aa, Homo sapiens
VALHPLVILNISDHWIRMRSQEGRPVQVIGALIGKQEGRNIEVMNSFELLSHTVEEKIIIDKEYYYTKEEQFKQVFKELEFLGWYTTGGPPDPSDIHVHKQVCEIIESPLFLKLNPMTKHTDLPVSVFESVIDIINGEATMLFAELTYTLATEEAERIGVDHVARMTATGSGENSTVAEHLIAQHSAIKMLHSRVKLILEYVKASEAGEVPFNHEILREAYALCHCLPVLSTDKFKTDFYDQCNDVGLMAYLGTITKTCNTMNQFVNKFNVLYDRQGIGRRMRGLFF

SEQ ID NO: 216 - protein, 266 aa, Homo sapiens
VRLHPVILASIVDSYERRNEGAARVIGTLLGTVDKHSVEVTNCFSVPHNESEDEVAVDMEFAKNMYELHKKVSPNELILGWYATGHDITEHSVLIHEYYSREAPNPIHLTVDTSLQNGRMSIKAYVSTLMGVPGRTMGVMFTPLTVKYAYYDTERIGVDLIMKTCFSPNRVIGLSSDLQQVGGASARIQDALSTVLQYAEDVLSGKVSADNTVGRFLMSLVNQVPKIVPDDFETMLNSNINDLLMVTYLANLTQSQIALNEKLVNL

SEQ ID NO: 217 - protein, 316 aa, Homo sapiens
VVVHPLVLLSVVDHFNRIGKVGNQKRVVGVLLGSWQKKVLDVSNSFAVPFDEDDKDDSVWFLDHDYLENMYGMFKKVNARERIVGWYHTGPKLHKNDIAINELMKRYCPNSVLVIIDVKPKDLGLPTEAYISVEEVHDDGTPTSKTFEHVTSEIGAEEAEEVGVEHLLRDIKDTTVGTLSQRITNQVHGLKGLNSKLLDIRSYLEKVATGKLPINHQIIYQLQDVFNLLPDVSLQEFVKAFYLKTNDQMVVVYLASLIRSVVALHNLINNKIANRDAEKKEGQEKEESKKDRKEDKEKDKDKEKSDVKKEEKKEKK

SEQ ID NO: 218 - protein, 314 aa, Homo sapiens
VQIDGLVVLKIIKHYQEEGQGTEVVQGVLLGLVVEDRLEITNCFPFPQHTEDDADFDEVQYQMEMMRSLRHVNIDHLHVGWYQSTYYGSFVTRALLDSQFSYQHAIEESVVLIYDPIKTAQGSLSLKAYRLTPKLMEVCKEKDFSPEALKKANITFEYMFEEVPIVIKNSHLINVLMWELEKKSAVADKHELLSLASSNHLGKNLQLLMDRVDEMSQDIVKYNTYMRNTSKQQQQKHQYQQRRQQENMQRQSRGEPPLPEEDLSKLFKPPQPPARMDSLLIAGQINTYCQNIKEFTAQNLGKLFMAQALQEYNN

SEQ ID NO: 219 - protein, 281 aa, Homo sapiens
YCKISALALLKMVMHARSGGNLEVMGLMLGKVDGETMIIMDSFALPVEGTETRVNAQAAAYEYMAAYIENAKQVGRLENAIGWYHSHPGYGCWLSGIDVSTQMLNQQFQEPFVAVVIDPTRTISAGKVNLGAFRTYPKGYKPPDEGPSEYQTIPLNKIEDFGVHCKQYYALEVSYFKSSLDRKLLELLWNKYWVNTLSSSSLLTNADYTTGQVFDLSEKLEQSEAQLGRGSFMLGLETHDRKSEDKLAKATRDSCKTTIEAIHGLMSQVIKDKLFNQINIS

SEQ ID NO: 220 - protein, 305 aa, Homo sapiens
VHLESDAFLVCLNHALSTEKEEVMGLCIGELNDDTRSDSKFAYTGTEMRTVAEKVDAVRIVHIHSVIILRRSDKRKDRVEISPEQLSAASTEAERLAELTGRPMRVVGWYHSHPHITVWPSHVDVRTQAMYQMMDQGFVGLIFSCFIEDKNTKTGRVLYTCFQSIQAQKSSESLHGPRDFWSSSQHISIEGQKEEERYERIEIPIHIVPHVTIGKVCLESAVELPKILCQEEQDAYRRIHSLTHLDSVTKIHNGSVFTKNLCSQMSAVSGPLLQWLEDRLEQNQQHLQELQQEKEELMQELSSLE

SEQ ID NO: 221 - protein, 960 aa, Homo sapiens
MKIPNIGNVMNKFEILGVVGEGAYGVVLKCRHKETHEIVAIKKFKDSEENEEVKETTLRELKMLRTLKQENIVELKEAFRRRGKLYLVFEYVEKNMLELLEEMPNGVPPEKVKSYIYQLIKAIHWCHKNDIVHRDIKPENLLISHNDVLKLCDFGFARNLSEGNNANYTEYVATRWYRSPELLLGAPYGKSVDMWSVGCILGELSDGQPLFPGESEIDQLFTIQKVLGPLPSEQMKLFYSNPRFHGLRFPAVNHPQSLERRYLGILNSVLLDLMKNLLKLDPADRYLTEQCLNHPTFQTQRLLDRSPSRSAKRKPYHVESSTLSNRNQAGKSTALQSHHRSNSKDIQNLSVGLPRADEGLPANESFLNGNLAGASLSPLHTKTYQASSQPGSTSKDLTNNNIPHLLSPKEAKSKTEFDFNIDPKPSEGPGTKYLKSNSRSQQNRHSFMESSQSKAGTLQPNEKQSRHSYIDTIPQSSRSPSYRTKAKSHGALSDSKSVSNLSEARAQIAEPSTSRYFPSSCLDLNSPTSPTPTRHSDTRTLLSPSGRNNRNEGTLDSRRTTTRHSKTMEELKLPEHMDSSHSHSLSAPHESFSYGLGYTSPFSSQQRPHRHSMYVTRDKVRAKGLDGSLSIGQGMAARANSLQLLSPQPGEQLPPEMTVARSSVKETSREGTSSFHTRQKSEGGVYHDPHSDDGTAPKENRHLYNDPVPRRVGSFYRVPSPRPDNSFHENNVSTRVSSLPSESSSGTNHSKRQPAFDPWKSPENISHSEQLKEKEKQGFFRSMKKKKKKSQTVPNSDSPDLLTLQKSIHSASTPSSRPKEWRPEKISDLQTQSQPLKSLRKLLHLSSASNHPASSDPRFQPLTAQQTKNSFSEIRIHPLSQASGGSSNIRQEPAPKGRPALQLPGQMDPGWHVSSVTRSATEGPSYSEQLGAKSGPNGHPYNRTNRSRMPNLNDLKETAL

SEQ ID NO: 222 - protein, 1465 aa, Homo sapiens
MPEQERQITAREGASRKILSKLSLPTRAWEPAMKKSFAFDNVGYEGGLDGLGPSSQVATSTVRILGMTCQSCVKSIEDRISNLKGIISMKVSLEQGSATVKYVPSVVCLQQVCHQIGDMGFEASIAEGKAASWPSRSLPAQEAVVKLRVEGMTCQSCVSSIEGKVRKLQGVVRVKVSLSNQEAVITYQPYLIQPEDLRDHVNDMGFEAAIKSKVAPLSLGPIDIERLQSTNPKRPLSSANQNFNNSETLGHQGSHVVTLQLRIDGMHCKSCVLNIEENIGQLLGVQSIQVSLENKTAQVKYDPSCTSPVALQRAIEALPPGNFKVSLPDGAEGSGTDHRSSSSHSPGSPPRNQVQGTCSTTLIAIAGMTCASCVHSIEGMISQLEGVQQISVSLAEGTATVLYNPSVISPEELRAAIEDMGFEASVVSESCSTNPLGNHSAGNSMVQTTDGTPTSVQEVAPHTGRLPANHAPDILAKSPQSTRAVAPQKCFLQIKGMTCASCVSNIERNLQKEAGVLSVLVALMAGKAEIKYDPEVIQPLEIAQFIQDLGFEAAVMEDYAGSDGNIELTITGMTCASCVHNIESKLTRTNGITYASVALATSKALVKFDPEIIGPRDIIKIIEEIGFHASLAQRNPNAHHLDHKMEIKQWKKSFLCSLVFGIPVMALMIYMLIPSNEPHQSMVLDHNIIPGLSILNLIFFILCTFVQLLGGWYFYVQAYKSLRHRSANMDVLIVLATSIAYVYSLVILVVAVAEKAERSPVTFFDTPPMLFVFIALGRWLEHLAKSKTSEALAKLMSLQATEATVVTLGEDNLIIREEQVPMELVQRGDIVKVVPGGKFPVDGKVLEGNTMADESLITGEAMPVTKKPGSTVIAGSINAHGSVLIKATHVGNDTTLAQIVKLVEEAQMSKAPIQQLADRFSGYFVPFIIIMSTLTLVVWIVIGFIDFGVVQRYFPNPNKHISQTEVIIRFAFQTSITVLCIACPCSLGLATPTAVMVGTGVAAQNGILIKGGKPLEMAHKIKTVMFDKTGTITHGVPRVMRVLLLGDVATLPLRKVLAVVGTAEASSEHPLGVAVTKYCKEELGTETLGYCTDFQAVPGCGIGCKVSNVEGILAHSERPLSAPASHLNEAGSLPAEKDAVPQTFSVLIGNREWLRRNGLTISSDVSDAMTDHEMKGQTAILVAIDGVLCGMIAIADAVKQEAALAVHTLQSMGVDVVLITGDNRKTARAIATQVGINKVFAEVLPSHKVAKVQELQNKGKKVAMVGDGVNDSPALAQADMGVAIGTGTDVAIEAADVVLIRNDLLDVVASIHLSKRTVRRIRINLVLALIYNLVGIPIAAGVFMPIGIVLQPWMGSAAMAASSVSVVLSSLQLKCYKKPDLERYEAQAHGHMKPLTASQVSVHIGMDDRWRDSPRATPWDQVSYVSQVSLSSLTSDKPSRHSAAADDDGDKWSLLLNGRDEEQYI

SEQ ID NO: 223 - protein, 594 aa, Homo sapiens
MAPIGLKAVVGEKIMHDVIKKVKKKGEWKVLVVDQLSMRMLSSCCKMTDIMTEGITIVEDINKRREPLPSLEAVYLITPSEKSVHSLISDFKDPPTAKYRAAHVFFTDSCPDALFNELVKSRAAKVIKTLTEINIAFLPYESQVYSLDSADSFQSFYSPHKAQMKNPILERLAEQIATLCATLKEYPAVRYRGEYKDNALLAQLIQDKLDAYKADDPTMGEGPDKARSQLLILDRGFDPSSPVLHELTFQAMSYDLLPIENDVYKYETSGIGEARVKEVLLDEDDDLWIALRHKHIAEVSQEVTRSLKDFSSSKRMNTGEKTTMRDLSQMLKKMPQYQKELSKYSTHLHLAEDCMKHYQGTVDKLCRVEQDLAMGTDAEGEKIKDPMRAIVPILLDANVSTYDKIRIILLYIFLKNGITEENLNKLIQHAQIPPEDSEIITNMAHLGVPIVTDSTLRRRSKPERKERISEQTYQLSRWTPIIKDIMEDTIEDKLDTKHYPYISTRSSASFSTTAVSARYGHWHKNKAPGEYRSGPRLIIFILGGVSLNEMRCAYEVTQANGKWEVLIGSTHILTPQKLLDTLKKLNKTDEEISS

SEQ ID NO: 224 - protein, 1343 aa, Homo sapiens [sequence omitted]

SEQ ID NO: 225 - protein, 593 aa, Homo sapiens
MWTLVSWVALTAGLVAGTRCPDGQFCPVACCLDPGGASYSCCRPLLDKWPTTLSRHLGGPCQVDAHCSAGHSCIFTVSGTSSCCPFPEAVACGDGHHCCPRGFHCSADGRSCFQRSGNNSVGAIQCPDSQFECPDFSTCCVMVDGSWGCCPMPQASCCEDRVHCCPHGAFCDLVHTRCITPTGTHPLAKKLPAQRTNRAVALSSSVMCPDARSRCPDGSTCCELPSGKYGCCPMPNATCCSDHLHCCPQDTVCDLIQSKCLSKENATTDLLTKLPAHTVGDVKCDMEVSCPDGYTCCRLQSGAWGCCPFTQAVCCEDHIHCCPAGFTCDTQKGTCEQGPHQVPWMEKAPAHLSLPDPQALKRDVPCDNVSSCPSSDTCCQLTSGEWGCCPIPEAVCCSDHQHCCPQGYTCVAEGQCQRGSEIVAGLEKMPARRASLSHPRDIGCDQHTSCPVGQTCCPSLGGSWACCQLPHAVCCEDRQHCCPAGYTCNVKARSCEKEVVSAQPATFLARSPHVGVKDVECGEGHFCHDNQTCCRDNRQGWACCPYRQGVCCADRRHCCPAGFRCAARGTKCLRREAPRWDAPLRDPALRQLL

SEQ ID NO: 226 - protein, 1218 aa, Homo sapiens
MRSPRTRGRSGRPLSLLLALLCALRAKVCGASGQFELEILSMQNVNGELQNGNCCGGARNPGDRKCTRDECDTYFKVCLKEYQSRVTAGGPCSFGSGSTPVIGGNTFNLKASRGNDRNRIVLPFSFAWPRSYTLLVEAWDSSNDTVQPDSIIEKASHSGMINPSRQWQTLKQNTGVAHFEYQIRVTCDDYYYGFGCNKFCRPRDDFFGHYACDQNGNKTCMEGWMGPECNRAICRQGCSPKHGSCKLPGDCRCQYGWQGLYCDKCIPHPGCVHGICNEPWQCLCETNWGGQLCDKDLNYCGTHQPCLNGGTCSNTGPDKYQCSCPEGYSGPNCEIAEHACLSDPCHNRGSCKETSLGFECECSPGWTGPTCSTNIDDCSPNNCSHGGTCQDLVNGFKCVCPPQWTGKTCQLDANECEAKPCVNAKSCKNLIASYYCDCLPGWMGQNCDININDCLGQCQNDASCRDLVNGYRCICPPGYAGDHCERDIDECASNPCLNGGHCQNEINRFQCLCPTGFSGNLCQLDIDYCEPNPCQNGAQCYNRASDYFCKCPEDYEGKNCSHLKDHCRTTPCEVIDSCTVAMASNDTPEGVRYISSNVCGPHGKCKSQSGGKFTCDCNKGFTGTYCHENINDCESNPCRNGGTCIDGVNSYKCICSDGWEGAYCETNINDCSQNPCHNGGTCRDLVNDFYCDCKNGWKGKTCHSRDSQCDEATCNNGGTCYDEGDAFKCMCPGGWEGTTCNIARNSSCLPNPCHNGGTCVVNGESFTCVCKEGWEGPICAQNTNDCSPHPCYNSGTCVDGDNWYRCECAPGFAGPDCRININECQSSPCAFGATCVDEINGYRCVCPPGHSGAKCQEVSGRPCITMGSVIPDGAKWDDDCNTCQCLNGRIACSKVWCGPRPCLLHKGHSECPSGQSCIPILDDQCFVHPCTGVGECRSSSLQPVKTKCTSDSYYQDNCANITFTFNKEMMSPGLTTEHICSELRNLNILKNVSAEYSIYIACEPSPSANNEIHVAISAEDIRDDGNPIKEITDKIIDLVSKRDGNSSLIAAVAEVRVQRRPLKNRTDFLVPLLSSVLTVAWICCLVTAFYWCLRKRRKPGSHTHSASEDNTTNNVREQLNQIKNPIEKHGANTVPIKDYENKNSKMSKIRTHNSEVEEDDMDKHQQKARFAKQPAYTLVDREEKPPNGTPTKHPNWTNKQDNRDLESAQSLNRMEYIV

SEQ ID NO: 227 - protein, 1603 aa, Homo sapiens
MRTTKVYKLVIHKKGFGGSDDELVVNPKVFPHIKLGDIVEIAHPNDEYSPLLLQVKSLKEDLQKETISVDQTVTQVFRLRPYQDVYVNVVDPKDVTLDLVELTFKDQYIGRGDMWRLKKSLVSTCAYITQKVEFAGIRAQAGELWVKNEKVMCGYISEDTRVVFRSTSAMVYIFIQMSCEMWDFDIYGDLYFEKAVNGFLADLFTKWKEKNCSHEVTVVLFSRTFYDAKSVDEFPEINRASIRQDHKGRFYEDFYKVVVQNERREEWTSLLVTIKKLFIQYPVLVRLEQAEGFPQGDNSTSAQGNYLEAINLSFNVFDKHYINRNFDRTGQMSVVITPGVGVFEVDRLLMILTKQRMIDNGIGVDLVCMGEQPLHAVPLFKLHNRSAPRDSRLGDDYNIPHWINHSFYTSKSQLFCNSFTPRIKLAGKKPASEKAKNGRDTSLGSPKESENALPIQVDYDAYDAQVFRLPGPSRAQCLTTCRSVRERESHSRKSASSCDVSSSPSLPSRTLPTEEVRSQASDDSSLGKSANILMIPHPHLHQYEVSSSLGYTSTRDVLENMMEPPQRDSSAPGRFHVGSAESMLHVRPGGYTPQRALINPFAPSRMPMKLTSNRRRWMHTFPVGPSGEAIQIHHQTRQNMAELQGSGQRDPTHSSAELLELAYHEAAGRHSNSRQPGDGMSFLNFSGTEELSVGLLSNSGAGMNPRTQNKDSLEDSVSTSPDPILTLSAPPVVPGFCCTVGVDWKSLTTPACLPLTTDYFPDRQGLQNDYTEGCYDLLPEADIDRRDEDGVQMTAQQVFEEFICQRLMQGYQIIVQPKTQKPNPAVPPPLSSSPLYSRGLVSRNRPEEEDQYWLSMGRTFHKVTLKDKMITVTRYLPKYPYESAQIHYTYSLCPSHSDSEFVSCWVEFSHERLEEYKWNYLDQYICSAGSEDFSLIESLKFWRTRFLLLPACVTATKRITEGEAHCDIYGDRPRADEDEWQLLDGFVRFVEGLNRIRRRHRSDRMMRKGTAMKGLQMTGPISTHSLESTAPPVGKKGTSALSALLEMEASQKCLGEQQAAVHGGKSSAQSAESSSVAMTPTYMDSPRKDGAFFMEFVRSPRTASSAFYPQVSVDQTATPMLDGTSLGICTGQSMDRGNSQTFGNSQNIGEQGYSSTNSSDSSSQQLVASSLTSSSTLTEILEAMKHPSTGVQLLSEQKGLSPYCFISAEVVHWLVNHVEGIQTQAMAIDIMQKMLEEQLITHASGEAWRTFIYGFYFYKIVTDKEPDRVAMQQPATTWHTAGVDDFASFQRKWFEVAFVAEELVHSEIPAFLLPWLPSRPASYASRHSSFSRSFGGRSQAAALLAATVPEQRTVTLDVDVNNRTDRLEWCSCYYHGNFSLNAAFEIKLHWMAVTAAVLFEMVQGWHRKATSCGFLLVPVLEGPFALPSYLYGDPLRAQLFIPLNISCLLKEGSEHLFDSFEPETYWDRMHLFQEAIAHRFGFVQDKYSASAFNFPAENKPQYIHVTGTVFLQLPYSKRKFSGQQRRRRNSTSSTNQNMFCEERVGYNWAYNTMLTKTWRSSATGDEKFADRLLKDFTDFCINRDNRLVTFWTSCLEKMHASAP

SEQ ID NO: 228 - protein, 1807 aa, Homo sapiens
MAKPTSKDSGLKEKFKILLGLGTPRPNPRSAEGKQTEFIITAEILRELSMECGLNNRIRMIGQICEVAKTKKFEEHAVEALWKAVADLLQPERPLEARHAVLALLKAIVQGQGERLGVLRALFFKVIKDYPSNEDLHERLEVFKALTDNGRHITYLEEELADFVLQWMDVGLSSEFLLVLVNLVKFNSCYLDEYIARMVQMICLLCVRTASSVDIEVSLQVLDAVVCYNCLPAESLPLFIVTLCRTINVKELCEPCWKLMRNLLGTHLGHSAIYNMCHLMEDRAYMEDAPLLRGAVFFVGMALWGAHRLYSLRNSPTSVLPSFYQAMACPNEVVSYEIVLSITRLIKKYRKELQVVAWDILLNIIERLLQQLQTLDSPELRTIVHDLLTTVEELCDQNEFHGSQERYFELVERCADQRPESSLLNLISYRAQSIHPAKDGWIQNLQALMERFFRSESRGAVRIKVLDVLSFVLLINRQFYEEELINSVVISQLSHIPEDKDHQVRKLATQLLVDLAEGCHTHHFNSLLDIIEKVMARSLSPPPELEERDVAAYSASLEDVKTAVLGLLVILQTKLYTLPASHATRVYEMLVSHIQLHYKHSYTLPIASSIRLQAFDFLLLLRADSLHRLGLPNKDGVVRFSPYCVCDYMEPERGSEKKTSGPLSPPTGPPGPAPAGPAVRLGSVPYSLLFRVLLQCLKQESDWKVLKLVLGRLPESLRYKVLIFTSPCSVDQLCSALCSMLSGPKTLERLRGAPEGFSRTDLHLAVVPVLTALISYHNYLDKTKQREMVYCLEQGLIHRCASQCVVALSICSVEMPDIIIKALPVLVVKLTHISATASMAVPLLEFLSTLARLPHLYRNFAAEQYASVFAISLPYTNPSKFNQYIVCLAHHVIAMWFIRCRLPFRKDFVPFITKGLRSNVLLSFDDTPEKDSFRARSTSLNERPKSLRIARPPKQGLNNSPPVKEFKESSAAEAFRCRSISVSEHVVRSRIQTSLTSASLGSADENSVAQADDSLKNLHLELTETCLDMMARYVFSNFTAVPKRSPVGEFLLAGGRTKTWLVGNKLVTVTTSVGTGTRSLLGLDSGELQSGPESSSSPGVHVRQTKEAPAKLESQAGQQVSRGARDRVRSMSGGHGLRVGALDVPASQFLGSATSPGPRTAPAAKPEKASAGTRVPVQEKTNLAAYVPLLTQGWAEILVRRPTGNTSWLMSLENPLSPFSSDINNMPLQELSNALMAAERFKEHRDTALYKSLSVPAASTAKPPPLPRSNTVASFSSLYQSSCQGQLHRSVSWADSAVVMEEGSPGEVPVLVEPPGLEDVEAALGMDRRTDAYSRSSSVSSQEEKSLHAEELVGRGIPIERVVSSEGGRPSVDLSFQPSQPLSKSSSSPELQTLQDILGDPGDKADVGRLSPEVKARSQSGTLDGESAAWSASGEDSRGQPEGPLPSSSPRSPSGLRPRGYTISDSAPSRRGKRVERDALKSRATASNAEKVPGINPSFVFLQLYHSPFFGDESNKPILLPNESQSFERSVQLLDQIPSYDTHKIAVLYVGEGQSNSELAILSNEHGSYRYTEFLTGLGRLIELKDCQPDKVYLGGLDVCGEDGQFTYCWHDDIMQAVFHIATLMPTKDVDKHRCDKKRHLGNDFVSIVYNDSGEDFKLGTIKGQFNFVHVIVTPLDYECNLVSLQCRKDMEGLVDTSVAKIVSDRNLPFVARQMALHANMASQVHHSRSNPTDIYPSKWIARLRHIKRLRQRICEEAAYSNPSLPLVHPPSHSKAPAQTPAEPTPGYEVGQRKRLISSVEDFTEFV

SEQ ID NO: 229 - protein, 1164 aa, Homo sapiens
MAQQANVGELLAMLDSPMLGVRDDVTAVFKENLNSDRGPMLVNTLVDYYLETSSQPALHILTTLQEPHDKHLLDRINEYVGKAATRLSILSLLGHVIRLQPSWKHKLSQAPLLPSLLKCLKMDTDVVVLTTGVLVLITMLPMIPQSGKQHLLDFFDIFGRLSSWCLKKPGHVAEVYLVHLHASVYALFHRLYGMYPCNFVSFLRSHYSMKENLETFEEVVKPMMEHVRIHPELVTGSKDHELDPRRWKRLETHDVVIECAKISLDPTEASYEDGYSVSHQISARFPHRSADVTTSPYADTQNSYGCATSTPYSTSRLMLLNMPGQLPQTLSSPSTRLITEPPQATLWSPSMVCGMTTPPTSPGNVPPDLSHPYSKVFGTTAGGKGTPLGTPATSPPPAPLCHSDDYVHISLPQATVTPPRKEERMDSARPCLHRQHHLLNDRGSEEPPGSKGSVTLSDLPGFLGDLASEEDSIEKDKEEAAISRELSEITTAEAEPVVPRGGFDSPFYRDSLPGSQRKTHSAASSSQGASVNPEPLHSSLDKLGPDTPKQAFTPIDLPCGSADESPAGDRECQTSLETSIFTPSPCKIPPPTRVGFGSGQPPPYDHLFEVALPKTAHHFVIRKTEELLKKAKGNTEEDGVPSTSPMEVLDRLIQQGADAHSKELNKLPLPSKSVDWTHFGGSPPSDEIRTLRDQLLLLHNQLLYERFKRQQHALRNRRLLRKVIKAAALEEHNAAMKDQLKLQEKDIQMWKVSLQKEQARYNQLQEQRDTMVTKLHSQIRQLQHDREEFYNQSQELQTKLEDCRNMIAELRIELKKANNKVCHTELLLSQVSQKLSNSESVQQQMEFLNRQLLVLGEVNELYLEQLQNKHSDTTKEVEMMKAAYRKELEKNRSHVLQQTQRLDTSQKRILELESHLAKKDHLLLEQKKYLEDVKLQARGQLQAAESRYEAQKRITQVFELEILDLYGRLEKDGLLKKLEEEKAEAAEAAEERLDCCNDGCSDSMVGHNEEASGHNGETKTPRPSSARGSSGSRGGGGSSSSSSELSTPEKPPHQRAGPFSSRWETTMGEASASIPTTVGSLPSSKSFLGMKARELFRNKSESQCDEDGMTSSLSESLKTELGKDLGVEAKIPLNLDGPHPSPPTPDSVGQLHIMDYNETHHEHS

SEQ ID NO: 230 - protein, 1690 aa, Homo sapiens
MAGASVKVAVRVRPFNSREMSRDSKCIIQMSGSTTTIVNPKQPKETPKSFSFDYSYWSHTSPEDINYASQKQVYRDIGEEMLQHAFEGYNVCIFAYGQTGAGKSYTMMGKQEKDQQGIIPQLCEDLFSRINDTTNDNMSYSVEVSYMEIYCERVRDLLNPKNKGNLRVREHPLLGPYVEDLSKLAVTSYNDIQDLMDSGNKARTVAATNMNETSSRSHAVFNIIFTQKRHDAETNITTEKVSKISLVDLAGSERADSTGAKGTRLKEGANINKSLTTLGKVISALAEMDSGPNKNKKKKKTDFIPYRDSVLTWLLRENLGGNSRTAMVAALSPADINYDETLSTLRYADRAKQIRCNAVINEDPNNKLIRELKDEVTRLRDLLYAQGLGDITDMTNALVGMSPSSSLSALSSRAASVSSLHERILFAPGSEEAIERLKETEKIIAELNETWEEKLRRTEAIRMEREALLAEMGVAMREDGGTLGVFSPKKTPHLVNLNEDPLMSECLLYYIKDGITRVGREDGERRQDIVLSGHFIKEEHCVFRSDSRGGSEAVVTLEPCEGADTYVNGKKVTEPSILRSGNRIIMGKSHVFRFNHPEQARQERERTPCAETPAEPVDWAFAQRELLEKQGIDMKQEMEQRLQELEDQYRREREEATYLLEQQRLDYESKLEALQKQMDSRYYPEVNEEEEEPEDEVQWTERECELALWAFRKWKWYQFTSLRDLLWGNAIFLKEANAISVELKKKVQFQFVLLTDTLYSPLPPDLLPPEAAKDRETRPFPRTIVAVEVQDQKNGATHYWTLEKLRQRLDLMREMYDRAAEVPSSVIEDCDNVVTGGDPFYDRFPWFRLVGRAFVYLSNLLYPVPLVHRVAIVSEKGEVKGFLRVAVQAISADEEAPDYGSGVRQSGTAKISFDDQHFEKFQSESCPVVGMSRSGTSQEELRIVEGQGQGADVGPSADEVNNNTCSAVPPEGLLLDSSEKAALDGPLDAALDHLRLGNTFTFRVTVLQASSISAEYADIFCQFNFIHRHDEAFSTEPLKNTGRGPPLGFYHVQNIAVEVTKSFIEYIKSQPIVFEVFGHYQQHPFPPLCKDVLSPLRPSRRHFPRVMPLSKPVPATKLSTLTRPCPGPCHCKYDLLVYFEICELEANGDYIPAVVDHRGGMPCMGTFLLHQGIQRRITVTLLHETGSHIRWKEVRELVVGRIRNTPETDESLIDPNILSLNILSSGYIHPAQDDRTFYQFEAAWDSSMHNSLLLNRVTPYREKIYMTLSAYIEMENCTQPAVVTKDFCMVFYSRDAKLPASRSIRNLFGSGSLRASESNRVTGVYELSLCHVADAGSPGMQRRRRRVLDTSVAYVRGEENLAGWRPRSDSLILDHQWELEKLSLLQEVEKTRHYLLLREKLETAQRPVPEALSPAFSEDSESHGSSSASSPLSAEGRPSPLEAPNERQRELAVKCLRLLTHTFNREYTHSHVCVSASESKLSEMSVTLLRDPSMSPLGVATLTPSSTCPSLVEGRYGATDLRTPQPCSRPASPEPELLPEADSKKLPSPARATETDKEPQRLLVPDIQEIRVSPIVSKKGYLHFLEPHTSGWARRFVVVRRPYAYMYNSDKDTVERFVLNLATAQVEYSEDQQAMLKTPNTFAVCTEHRGILLQAASDKDMHDWLYAFNPLLAGTIRSKLSRRRSAQMRV

SEQ ID NO: 231 - protein, 864 aa, Homo sapiens
MGNRGMEDLIPLVNRLQDAFSAIGQNADLDLPQIAVVGGQSAGKSSVLENFVGRDFLPRGSGIVTRRPLVLQLVNATTEYAEFLHCKGKKFTDFEEVRLEIEAETDRVTGTNKGISPVPINLRVYSPHVLNLTLVDLPGMTKVPVGDQPPDIEFQIRDMLMQFVTKENCLILAVSPANSDLANSDALKVAKEVDPQGQRTIGVITKLDLMDEGTDARDVLENKLLPLRRGYIGVVNRSQKDIDGKKDITAALAAERKFFLSHPSYRHLADRMGTPYLQKVLNQQLTNHIRDTLPGLRNKLQSQLLSIEKEVEEYKNFRPDDPARKTKALLQMVQQFAVDFEKRIEGSGDQIDTYELSGGARINRIFHERFPFELVKMEFDEKELRREISYAIKNIHGIRTGLFTPDMAFETIVKKQVKKIREPCLKCVDMVISELISTVRQCTKKLQQYPRLREEMERIVTTHIREREGRTKEQVMLLIDIELAYMNTNHEDFIGFANAQQRSNQMNKKKTSGNQDEILVIRKGWLTINNIGIMKGGSKEYWFVLTAENLSWYKDDEEKEKKYMLSVDNLKLRDVEKGFMSSKHIFALFNTEQRNVYKDYRQLELACETQEEVDSWKASFLRAGVYPERVGDKEKASETEENGSDSFMHSMDPQLERQVETIRNLVDSYMAIVNKTVRDLMPKTIMHLMINNTKEFIFSELLANLYSCGDQNTLMEESAEQAQRRDEMLRMYHALKEALSIIGDINTTTVSTPMPPPVDDSWLQVQSVPAGRRSPTSSPTPQRRAPAVPPARPGSRGPAPGPPPAGSALGGAPPVPSRPGASPDPFGPPPQVPSRPNRAPPGVPSRSGQASPSRPESPRPPFDL

SEQ ID NO: 232 - protein, 1731 aa, Homo sapiens
MDGPGASAVVVRVGIPDLQQTKCLRLDPAAPVWAAKQRVLCALNHSLQDALNYGLFQPPSRGRAGKFLDEERLLQEYPPNLDTPLPYLEFRYKRRVYAQNLIDDKQFAKLHTKANLKKFMDYVQLHSTDKVARLLDKGLDPNFHDPDSGECPLSLAAQLDNATDLLKVLKNGGAHLDFRTRDGLTAVHCATRQRNAAALTTLLDLGASPDYKDSRGLTPLYHSALGGGDALCCELLLHDHAQLGITDENGWQEIHQACRFGHVQHLEHLLFYGADMGAQNASGNTALHICALYNQESCARVLLFRGANRDVRNYNSQTAFQVAIIAGNFELAEVIKTHKDSDVVPFRETPSYAKRRRLAGPSGLASPRPLQRSASDINLKGEAQPAASPGPSLRSLPHQLLLQRLQEEKDRDRDADQESNISGPLAGRAGQSKISPSGPGGPGPAPGPGPAPPAPPAPPPRGPKRKLYSAVPGRKFIAVKAHSPQGEGEIPLHRGEAVKVLSIGEGGFWEGTVKGRTGWFPADCVEEVQMRQHDTRPETREDRTKRLFRHYTVGSYDSLTSHSDYVIDDKVAVLQKRDHEGFGFVLRGAKAETPIEEFTPTPAFPALQYLESVDVEGVAWRAGLRTGDFLIEVNGVNVVKVGHKQVVALIRQGGNRLVMKVVSVTRKPEEDGARRRAPPPPKRAPSTTLTLRSKSMTAELEELASIRRRKGEKLDEMLAAAAEPTLRPDIADADSRAATVKQRPTSRRITPAEISSLFERQGLPGPEKLPGSLRKGIPRTKSVGEDEKLASLLEGRFPRSTSMQDPVREGRGIPPPPQTAPPPPPAPYYFDSGPPPAFSPPPPPGRAYDTVRSSFKPGLEARLGAGAAGLYEPGAALGPLPYPERQKRARSMIILQDSAPESGDAPRPPPAATPPERPKRRPRPPGPDSPYANLGAFSASLFAPSKPQRRKSPLVKQLQVEDAQERAALAVGSPGPGGGSFAREPSPTHRGPRPGGLDYGAGDGPGLAFGGPGPAKDRRLEERRRSTVFLSVGAIEGSAPGADLPSLQPSRSIDERLLGTGPTAGRDLLLPSPVSALKPLVSGPSLGPSGSTFIHPLTGKPLDPSSPLALALAARERALASQAPSRSPTPVHSPDADRPGPLFVDVQARDPERGSLASPAFSPRSPAWIPVPARREAEKVPREERKSPEDKKSMILSVLDTSLQRPAGLIVVHATSNGQEPSRLGGAEEERPGTPELAPAPMQSAAVAEPLPSPRAQPPGGTPADAGPGQGSSEEEPELVFAVNLPPAQLSSSDEETREELARIGLVPPPEEFANGVLLATPLAGPGPSPTTVPSPASGKPSSEPPPAPESAADSGVEEADTRSSSDPHLETTSTISTVSSMSTLSSESGELTDTHTSFADGHTFLLEKPPVPPKPKLKSPLGKGPVTFRDPLLKQSSDSELMAQQHHAASAGLASAAGPARPRYLFQRRSKLWGDPVESRGLPGPEDDKPTVISELSSRLQQLNKDTRSLGEEPVGGLGSLLDPAKKSPIAAARLFSSLGELSSISAQRSPGGPGGGASYSVRPSGRYPVARRAPSPVKPASLERVEGLGAGAGGAGRPFGLTPPTILKSSSLSIPHEPKEVRFVVRSVSARSRSPSPSPLPSPASGPGPGAPGPRRPFQQKPLQLWSKFDVGDWLESIHLGEHRDRFEDHEIEGAHLPALTKDDFVELGVTRVGHRMNIERALRQLDGS

SEQ ID NO: 233 - protein, 3685 aa, Homo sapiens
MLWWEEVEDCYEREDVQKKTFTKWVNAQFSKFGKQHIENLFSDLQDGRRLLDLLEGLTGQKLPKEKGSTRVHALNNVNKALRVLQNNNVDLVNIGSTDIVDGNHKLTLGLIWNIILHWQVKNVMKNIMAGLQQTNSEKILLSWVRQSTRNYPQVNVINFTTSWSDGLALNALIHSHRPDLFDWNSVVCQQSATQRLEHAFNIARYQLGIEKLLDPEDVDTTYPDKKSILMYITSLFQVLPQQVSIEAIQEVEMLPRPPKVTKEEHFQLHHQMHYSQQITVSLAQGYERTSSPKPRFKSYAYTQAAYVTTSDPTRSPFPSQHLEAPEDKSFGSSLMESEVNLDRYQTALEEVLSWLLSAEDTLQAQGEISNDVEVVKDQFHTHEGYMMDLTAHQGRVGNILQLGSKLIGTGKLSEDEETEVQEQMNLLNSRWECLRVASMEKQSNLHRVLMDLQNQKLKELNDWLTKTEERTRKMEEEPLGPDLEDLKRQVQQHKVLQEDLEQEQVRVNSLTHMVVVVDESSGDHATAALEEQLKVLGDRWANICRWTEDRWVLLQDILLKWQRLTEEQCLFSAWLSEKEDAVNKIHTTGFKDQNEMLSSLQKLAVLKADLEKKKQSMGKLYSLKQDLLSTLKNKSVTQKTEAWLDNFARCWDNLVQKLEKSTAQISQAVTTTQPSLTQTTVMETVTTVTTREQILVKHAQEELPPPPPQKKRQITVDSEIRKRLDVDITELHSWITRSEAVLQSPEFAIFRKEGNFSDLKEKVNAIEREKAEKFRKLQDASRSAQALVEQMVNEGVNADSIKQASEQLNSRWIEFCQLLSERLNWLEYQNNIIAFYNQLQQLEQMTTTAENWLKIQPTTPSEPTAIKSQLKICKDEVNRLSDLQPQIERLKIQSIALKEKGQGPMFLDADFVAFTNHFKQVFSDVQAREKELQTIFDTLPPMRYQETMSAIRTWVQQSETKLSIPQLSVTDYEIMEQRLGELQALQSSLQEQQSGLYYLSTTVKEMSKKAPSEISRKYQSEFEEIEGRWKKLSSQLVEHCQKLEEQMNKLRKIQNHIQTLKKWMAEVDVFLKEEWPALGDSEILKKQLKQCRLLVSDIQTIQPSLNSVNEGGQKIKNEAEPEFASRLETELKELNTQWDHMCQQVYARKEALKGGLEKTVSLQKDLSEMHEWMTQAEEEYLERDFEYKTPDELQKAVEEMKRAKEEAQQKEAKVKLLTESVNSVIAQAPPVAQEALKKELETLTTNYQWLCTRLNGKCKTLEEVWACWHELLSYLEKANKWLNEVEFKLKTTENIPGGAEEISEVLDSLENLMRHSEDNPNQIRILAQTLTDGGVMDELINEELETFNSRWRELHEEAVRRQKLLEQSIQSAQETEKSLHLIQESLTFIDKQLAAYIADKVDAAQMPQEAQKIQSDLTSHEISLEEMKKHNQGKEAAQRVLSQIDVAQKKLQDVSMKFRLFQKPANFEQRLQESKMILDEVKMHLPALETKSVEQEVVQSQLNHCVNLYKSLSEVKSEVEMVIKTGRQIVQKKQTENPKELDERVTALKLHYNELGAKVTERKQQLEKCLKLSRKMRKEMNVLTEWLAATDMELTKRSAVEGMPSNLDSEVAWGKATQKEIEKQKVHLKSITEVGEALKTVLGKKETLVEDKLSLLNSNWIAVTSRAEEWLNLLLEYQKHMETFDQNVDHITKWIIQADTLLDESEKKKPQQKEDVLKRLKAELNDIRPKVDSTRDQAANLMANRGDHCRKLVEPQISELNHRFAAISHRIKTGKASIPLKELEQFNSDIQKLLEPLEAEIQQGVNLKEEDFNKDMNEDNEGTVKELLQRGDNLQQRITDERKREEIKIKQQLLQTKHNALKDLRSQRRKKALEISHQWYQYKRQADDLLKCLDDIEKKLASLPEPRDERKIKEIDRELQKKKEELNAVRRQAEGLSEDGAAMAVEPTQIQLSKRWREIESKFAQFRRLNFAQIHTVREETMMVMTEDMPLEISYVPSTYLTEITHVSQALLEVEQLLNAPDLCAKDFEDLFKQEESLKNIKDSLQQSSGRIDIIHSKKTAALQSATPVERVKLQEALSQLDFQWEKVNKMYKDRQGRFDRSVEKWRRFHYDIKIFNQWLTEAEQFLRKTQIPENWEHAKYKWYLKELQDGIGQRQTVVRTLNATGEEIIQQSSKTDASILQEKLGSLNLRWQEVCKQLSDRKKRLEEQKNILSEFQRDLNEFVLWLEEADNIASIPLEPGKEQQLKEKLEQVKLLVEELPLRQGILKQLNETGGPVLVSAPISPEEQDKLENKLKQTNLQWIKVSRALPEKQGEIEAQIKDLGQLEKKLEDLEEQLNHLLLWLSPIRNQLEIYNQPNQEGPFDVKETEIAVQAKQPDVEEILSKGQHLYKEKPATQPVKRKLEDLSSEWKAVNRLLQELRAKQPDLAPGLTTIGASPTQTVTLVTQPVVTKETAISKLEMPSSLMLEVPALADFNRAWTELTDWLSLLDQVIKSQRVMVGDLEDINEMIIKQKATMQDLEQRRPQLEELITAAQNLKNKTSNQEARTIITDRIERIQNQWDEVQEHLQNRRQQLNEMLKDSTQWLEAKEEAEQVLGQARAKLESWKEGPYTVDAIQKKITETKQLAKDLRQWQTNVDVANDLALKLLRDYSADDTRKVHMITENINASWRSIHKRVSEREAALEETHRLLQQFPLDLEKFLAWLTEAETTANVLQDATRKERLLEDSKGVKELMKQWQDLQGEIEAHTDVYHNLDENSQKILRSLEGSDDAVLLQRRLDNMNFKWSELRKKSLNIRSHLEASSDQWKRLHLSLQELLVWLQLKDDELSRQAPIGGDFPAVQKQNDVHRAFKRELKTKEPVIMSTLETVRIFLTEQPLEGLEKLYQEPRELPPEERAQNVTRLLRKQAEEVNTEWEKLNLHSADWQRKIDETLERLQELQEATDELDLKLRQAEVIKGSWQPVGDLLIDSLQDHLEKVKALRGEIAPLKENVSHVNDLARQLTTLGIQLSPYNLSTLEDLNTRWKLLQVAVEDRVRQLHEAHRDFGPASQHFLSTSVQGPWERAISPNKVPYYINHETQTTCWDHPKMTELYQSLADLNNVRFSAYRTAMKLRRLQKALCLDLLSLSAACDALDQHNLKQNDQPMDILQIINCLTTIYDRLEQEHNNLVNVPLCVDMCLNWLLNVYDTGRTGRIRVLSFKTGIISLCKAHLEDKYRYLFKQVASSTGFCDQRRLGLLLHDSIQIPRQLGEVASFGGSNIEPSVRSCFQFANNKPEIEAALFLDWMRLEPQSMVWLPVLHRVAAAETAKHQAKCNICKECPIIGFRYRSLKHFNYDICQSCFFSGRVAKGHKMHYPMVEYCTPTTSGEDVRDFAKVLKNKFRTKRYFAKHPRMGYLPVQTVLEGDNMETPVTLINFWPVDSAPASSPQLSHDDTHSRIEHYASRLAEMENSNGSYLNDSISPNESIDDEHLLIQHYCQSLNQDSPLSQPRSPAQILISLESEERGELERILADLEEENRNLQAEYDRLKQQHEHKGLSPLPSPPEMMPTSPQSPRDAELIAEAKLLRQHKGRLEARMQILEDHNKQLESQLHRLRQLLEQPQAEAKVNGTTVSSPSTSLQRSDSSQPMLLRVVGSQTSDSMGEEDLLSPPQDTSTGLEEVMEQLNNSFPSSRGRNTPGKPMREDTM

SEQ ID NO: 234 - protein, 2156 aa, Homo sapiens
MSDTPSTGFSIIHPTSSEGQVPPPRHLSLTHPVVAKRISFYKSGDPQFGGVRVVVNPRSFKSFDALLDNLSRKVPLPFGVRNISTPRGRHSITRLEELEDGESYLCSHGRKVQPVDLDKARRRPRPWLSSRAISAHSPPHPVAVAAPGMPRPPRSLVVFRNGDPKTRRAVLLSRRVTQSFEAFLQHLTEVMQRPVVKLYATDGRRVPSLQAVILSSGAVVAAGREPFKPGNYDIQKYLLPARLPGISQRVYPKGNAKSESRKISTHMSSSSRSQIYSVSSEKTHNNDCYLDYSFVPEKYLALEKNDSQNLPIYPSEDDIEKSIIFNQDGTMTVEMKVRFRIKEEETIKWTTTVSKTGPSNNDEKSEMSFPGRTESRSSGLKLAACSFSADVSPMERSSNQEGSLAEEINIQMTDQVAETCSSASWENATVDTDIIQGTQDQAKHRFYRPPTPGLRRVRQKKSVIGSVTLVSETEVQEKMIGQFSYSEERESGENKSEYHMFTHSCSKMSSVSNKPVLVQINNNDQMEESSLERKKENSLLKSSAISAGVIEITSQKMLEMSHNNGLPSTISNNSIVEEDVVDCVVLDNKTGIKNFKTYGNTNDRFSPISADATHFSSNNSGTDKNISEAPASEASSTVTARIDRLINEFAQCGLTKLPKNEKKILSSVASKKKKKSRQQAINSRYQDGQLATKGILNKNERINTKGRITKEMIVQDSDSPLKGGILCEEDLQKSDTVIESNTFCSKSNLNSTISKNFHRNKLNTTQNSKVQGLLTKRKSRSLNKISLGAPKKREIGQRDKVFPHNESKYCKSTFENKSLFHVFNILEQKPKDFYAPQSQAEVASGYLRGMAKKSLVSKVTDSHITLKSQKKRKGDKVKASAILSKQHATTRANSLASLKKPDFPEAIAHHSIQNYIQSWLQNINPYPTLKPIKSAPVCRNETSVVNCSNNSFSGNDPHTNSGKISNFVMESNKHITKIAGLTGDNLCKEGDKSFIANDTGEEDLHETQVGSLNDAYLVPLHEHCTLSQSAINDHNTKSHIAAEKSGPEKKLVYQEINLARKRQSVEAAIQVDPIEEETPKDLLPVLMLHQLQASVPGIHKTQNGVVQMPGSLAGVPFHSAICNSSTNLLLAWLLVLNLKGSMNSFCQVDAHKATNKSSETLALLEILKHIAITEEADDLKAAVANLVESTTSHFGLSEKEQDMVPIDLSANCSTVNIQSVPKCSENERTQGISSLDGGCSASEACAPEVCVLEVTCSPCEMCTVNKAYSPKETCNPSDTFFPSDGYGVDQTSMNKACFLGEVCSLTDTVFSDKACAQKENHTYEGACPIDETYVPVNVCNTIDFLNSKENTYTDNLDSTEELERGDDIQKDLNILTDPEYKNGFNTLVSHQNVSNLSSCGLCLSEKEAELDKKHSSLDDFENCSLRKFQDENAYTSFDMEEPRTSEEPGSITNSMTSSERNISELESFEELENHDTDIFNTVVNGGEQATEELIQEEVEASKTLELIDISSKNIMEEKRMNGIIYEIISKRLATPPSLDFCYDSKQNSEKETNEGETKMVKMMVKTMETGSYSESSPDLKKCIKSPVTSDWSDYRPDSDSEQPYKTSSDDPNDSGELTQEKEYNIGFVKRAIEKLYGKADIIKPSFFPGSTRKSQVCPYNSVEFQCSRKASLYDSEGQSFGSSEQVSSSSSMLQEFQEERQDKCDVSAVRDNYCRGDIVEPGTKQNDDSRILTDIEEGVLIDKGKWLLKENHLLRMSSENPGMCGNADTTSVDTLLDNNSSEVPYSHFGNLAPGPTMDELSSSELEELTQPLELKCNYFNMPHGSDSEPFHEDLLDVRNETCAKERIANHHTEEKGSHQSERVCTSVTHSFISAGNKVYPVSDDAIKNQPLPGSNMIHGTLQEADSLDKLYALCGQHCPILTVIIQPMNEEDRGFAYRKESDIENFLGFYLWMKIHPYLLQTDKNVFREENNKASMRQNLIDNAIGDIFDQFYFSNTFDLMGKRRKQKRINFLGLEEEGNLKKFQPDLKERFCMNFLHTSLLVVGNVDSNTQDLSGQTNEIFKAVDENNNLLNNRFQGSRTNLNQVVRENINCHYFFEMLGQACLLDICQVETSLNISNRNILELCMFEGENLFIWEEEDILNLTDLESSREQEDL

SEQ ID NO: 235 - protein, 34350 aa, Homo sapiens
MTTQAPTFTQPLQSVVVLEGSTATFEAHISGFPVPEVSWFRDGQVISTSTLPGVQISFSDGRAKLTIPAVTKANSGRYSLKATNGSGQATSTAELLVKAETAPPNFVQRLQSMTVRQGSQVRLQVRVTGIPTPVVKFYRDGAEIQSSLDFQISQEGDLYSLLIAEAYPEDSGTYSVNATNSVGRATSTAELLVQGEEEVPAKKTKTIVSTAQISESRQTRIEKKIEAHFDARSIATVEMVIDGAAGQQLPHKTPPRIPPKPKSRSPTPPSIAAKAQLARQQSPSPIRHSPSPVRHVRAPTPSPVRSVSPAARISTSPIRSVRSPLLMRKTQASTVATGPEVPPPWKQEGYVASSSEAEMRETTLTTSTQIRTEERWEGRYGVQEQVTISGAAGAAASVSASASYAAEAVATGAKEVKQDADKSAAVATVVAAVDMARVREPVISAVEQTAQRTTTTAVHIQPAQEQVRKEAEKTAVTKVVVAADKAKEQELKSRTKEVITTKQEQMHVTHEQIRKETEKTFVPKVVISAAKAKEQETRISEEITKKQKQVTQEAIRQETEITAASMVVVATAKSTKLETVPGAQEETTTQQDQMHLSYEKIMKETRKTVVPKVIVATPKVKEQDLVSRGREGITTKREQVQITQEKMRKEAEKTALSTIAVATAKAKEQETILRTRETMATRQEQIQVTHGKVDVGKKAEAVATVVAAVDQARVREPREPGHLEESYAQQTTLEYGYKERISAAKVAEPPQRPASEPHVVPKAVKPRVIQAPSETHIKTTDQKGMHISSQIKKTTDLTTERLVHVDKRPRTASPHFTVSKISVPKTEHGYEASIAGSAIATLQKELSATSSAQKITKSVKAPTVKPSETRVRAEPTPLPQFPFADTPDTYKSEAGVEVKKEVGVSITGTTVREERFEVLHGREAKVTETARVPAPVEIPVTPPTLVSGLKNVTVIEGESVTLECHISGYPSPTVTWYREDYQIESSIDFQITFQSGIARLMIREAFAEDSGRFTCSAVNEAGTVSTSCYLAVQVSEEFEKETTAVTEKFTTEEKRFVESRDVVMTDTSLTEEQAGPGEPAAPYFITKPVVQKLVEGGSVVFGCQVGGNPKPHVYWKKSGVPLTTGYRYKVSYNKQTGECKLVISMTFADDAGEYTIVVRNKHGETSASASLLEEADYELLMKSQQEMLYQTQVTAFVQEPKVGETAPGFVYSEYEKEYEKEQALIRKKMAKDTVVVRTYVEDQEFHISSFEERLIKEIEYRIIKTTLEELLEEDGEEKMAVDISESEAVESGFDSRIKNYRILEGMGVTFHCKMSGYPLPKIAWYKDGKRIKHGERYQMDFLQDGRASLRIPVVLPEDEGIYTAFASNIKGNAICSGKLYVEPAAPLGAPTYIPTLEPVSRIRSLSPRSVSRSPIRMSPARMSPARMSPARMSPARMSPGRRLEETDESQLERLYKPVFVLKPVSFKCLEGQTARFDLKVVGRPMPETFWFHDGQQIVNDYTHKVVIKEDGTQSLIIVPATPSDSGEWTVVAQNRAGRSSISVILTVEAVEHQVKPMFVEKLKNVNIKEGSRLEMKVRATGNPNPDIVWLKNSDIIVPHKYPKIRIEGTKGEAALKIDSTVSQDSAWYTATAINKAGRDTTRCKVNVEVEFAEPEPERKLIIPRGTYRAKEIAAPELEPLHLRYGQEQWEEGDLYDKEKQQKPFFKKKLTSLRLKRFGPAHFECRLTPIGDPTMVVEWLHDGKPLEAANRLRMINEFGYCSLDYGVAYSRDSGIITCRATNKYGTDHTSATLIVKDEKSLVEESQLPEGRKGLQRIEELERMAHEGALTGVTTDQKEKQKPDIVLYPEPVRVLEGETARFRCRVTGYPQPKVNWYLNGQLIRKSKRFRVRYDGIHYLDIVDCKSYDTGEVKVTAENPEGVIEHKVKLEIQQREDFRSVLRRAPEPRPEFHVHEPGKLQFEVQKVDRPVDTTETKEVVKLKRAERITHEKVPEESEELRSKFKRRTEEGYYEAITAVELKSRKKDESYEELLRKTKDELLHWTKELTEEEKKALAEEGKITIPTFKPDKIELSPSMEAPKIFERIQSQTVGQGSDAHFRVRVVGKPDPECEWYKNGVKIERSDRIYWYWPEDNVCELVIRDVTAEDSASIMVKAINIAGETSSHAFLLVQAKQLITFTQELQDVVAKEKDTMATFECETSEPFVKVKWYKDGMEVHEGDKYRMHSDRKVHFLSILTIDTSDAEDYSCVLVEDENVKTTAKLIVEGAVVEFVKELQDIEVPESYSGELECIVSPENIEGKWYHNDVELKSNGKYTITSRRGRQNLTVKDVTKEDQGEYSFVIDGKKTTCKLKMKPRPIAILQGLSDQKVCEGDIVQLEVKVSLESVEGVWMKDGQEVQPSDRVHIVIDKQSHMLLIEDMTKEDAGNYSFTIPALGLSTSGRVSVYSVDVITPLKDVNVIEGTKAVLECKVSVPDVTSVKWYLNDEQIKPDDRVQAIVKGTKQRLVINRTHASDEGPYKLIVGRVETNCNLSVEKIKIIRGLRDLTCTETQNVVFEVELSHSGIDVLWNFKDKEIKPSSKYKIEAHGKIYKLTVLNMMKDDEGKYTFYAGENMTSGKLTVAGGAISKPLTDQTVAESQEAVFECEVANPDSKGEWLRDGKHLPLTNNIRSESDGHKRRLIIAATKLDDIGEYTYKVATSKTSAKLKVEAVKIKKTLKNLTVTETQDAVFTVELTHPNVKGVQWIKNGVVLESNEKYAISVKGTIYSLRIKNCAIVDESVYGFRLGRLGASARLHVETVKIIKKPKDVTALENATVAFEVSVSHDTVPVKWFHKSVEIKPSDKHRLVSERKVHKLMLQNISPSDAGEYTAVVGQLECKAKLFVETLHITKTMKNIEVPETKTASFECEVSHFNVPSMWLKNGVEIEMSEKFKIVVQGKLHQLIIMNTSTEDSAEYTFVCGNDQVSATLTVTPIMITSMLKDINAEEKDTITFEVTVNYEGISYKWLKNGVEIKSTDKCQMRTKKLTHSLNIRNVHFGDAADYTFVAGKATSTATLYVEARHIEFRKHIKDIKVLEKKRAMFECEVSEPDITVQWMKDDQELQITDRIKIQKEKYVHRLLIPSTRMSDAGKYTVVAGGNVSTAKLFVEGRDVRIRSIKKEVQVIEKQRAVVEFEVNEDDVDAHWYKDGIEINFQVQERHKYVVERRIHRMFISETRQSDAGEYTFVAGRNRSSVTLYVNAPEPPQVLQELQPVTVQSGKPARFCAVISGRPQPKISWYKEEQLLSTGFKCKFLHDGQEYTLLLIEAFPEDAAVYTCEAKNDYGVATTSASLSVEVPEVVSPDQEMPVYPPAIITPLQDTVTSEGQPARFQCRVSGTDLKVSWYSKDKKIKPSRFFRMTQFEDTYQLEIAEAYPEDEGTYTFVASNAVGQVSSTANLSLEAPESILHERIEQEIEMEMKEFSSSFLSAEEEGLHSAELQLSKINETLELLSESPVYPTKFDSEKEGTGPIFIKEVSNADISMGDVATLSVTVIGIPKPKIQWFFNGVLLTPSADYKFVFDGDDHSLIILFTKLEDEGEYTCMASNDYGKTICSAYLKINSKGEGHKDTETESAVAKSLEKLGGPCPPHFLKELKPIRCAQGLPAIFEYTVVGEPAPTVTWFKENKQLCTSVYYTIIHNPNGSGTFIVNDPQREDSGLYICKAENMLGESTCAAELLVLLEDTDMTDTPCKAKSTPEAPEDFPQTPLKGPAVEALDSEQEIATFVKDTILKAALITEENQQLSYEHIAKANELSSQLPLGAQELQSILEQDKLTPESTREFLCINGSIHFQPLKEPSPNLQLQIVQSQKTFSKEGILMPEEPETQAVLSDTEKIFPSAMSIEQINSLTVEPLKTLLAEPEGNYPQSSIEPPMHSYLTSVAEEVLSPKEKTVSDTNREQRVTLQKQEAQSALILSQSLAEGHVESLQSPDVMISQVNYEPLVPSEHSCTEGGKILIESANPLENAGQDSAVRIEEGKSLRFPLALEEKQVLLKEEHSDNVVMPPDQIIESKREPVAIKKVQEVQGRDLLSKESLLSGIPEEQRLNLKIQICRALQAAVASEQPGLFSEWLRNIEKVEVEAVNITQEPRHIMCMYLVTSAKSVTEEVTIIIEDVDPQMANLKMELRDALCAIIYEEIDILTAEGPRIQQGAKTSLQEEMDSFSGSQKVEPITEPEVESKYLISTEEVSYFNVQSRVKYLDATPVTKGVASAVVSDEKQDESLKPSEEKEESSSESGTEEVATVKIQEAEGGLIKEDGPMIHTPLVDTVSEEGDIVHLTTSITNAKEVNWYFENKLVPSDEKFKCLQDQNTYTLVIDKVNTEDHQGEYVCEALNDSGKTATSAKLTVVKRAAPVIKRKIEPLEVALGHLAKFTCEIQSAPNVRFQWFKAGREIYESDKCSIRSSKYISSLEILRTQVVDCGEYTCKASNEYGSVSCTATLTVTEAYPPTFLSRPKSLTTFVGKAAKFICTVTGTPVIETIWQKDGAALSPSPNWRISDAENKHILELSNLTIQDRGVYSCKASNKFGADICQAELIIIDKPHFIKELEPVQSAINKKVHLECQVDEDRKVTVTWSKDGQKLPPGKDYKICFEDKIATLEIPLAKLKDSGTYVCTASNEAGSSSCSATVTVREPPSFVKKVDPSYLMLPGESARLHCKLKGSPVIQVTWFKNNKELSESNTVRMYFVNSEAILDITDVKVEDSGSYSCEAVNDVGSDSCSTEIVIKEPPSFIKTLEPADIVRGTNALLQCEVSGTGPFEISWFKDKKQIRSSKKYRLFSQKSLVCLEIFSFNSADVGEYECVVANEVGKCGCMATHLLKEPPTFVKKVDDLIALGGQTVTLQAAVRGSEPISVTWMKGQEVIREDGKIKMSFSNGVAVLIIPDVQISFGGKYTCLAENEAGSQTSVGELIVKEPAKIIERAELIQVTAGDPATLEYTVAGTPELKPKWYKDGRPLVASKKYRISFKNNVAQLKFYSAELHDSGQYTFEISNEVGSSSCETTFTVLDRDIAPFFTKPLRNVDSVVNGTCRLDCKIAGSLPMRVSWFKDGKEIAASDRYRIAFVEGTASLEIIRVDMNDAGNFTCRATNSVGSKDSSGALIVQEPPSFVTKPGSKDVLPGSAVCLKSTFQGSTPLTIRWFKGNKELVSGGSCYITKEALESSLELYLVKTSDSGTYTCKVSNVAGGVECSANLFVKEPATFVEKLEPSQLLKKGDATQLACKVTGTPPIKITWFANDREIKESSKHRMSFVESTAVLRLTDVGIEDSGEYMCEAQNEAGSDHCSSIVIVKESPYFTKEFKPIEVLKEYDVMLLAEVAGTPPFEITWFKDNTILRSGRKYKTFIQDHLVSLQILKFVAADAGEYQCRVTNEVGSSICSARVTLREPPSFIKKIESTSSLRGGTAAFQATLKGSLPITVTWLKDSDEITEDDNIRMTFENNVASLYLSGIEVKHDGKYVCQAKNDAGIQRCSALLSVKEPATITEEAVSIDVTQGDPATLQVKFSGTKEITAKWFKDGQELTLGSKYKISVTDTVSILKIISTEKKDSGEYTFEVQNDVGRSSCKARINVLDLIIPPSFTKKLKKMDSIKGSFIDLECIVAGSHPISIQWFKDDQEISASEKYKFSFHDNTAFLEISQLEGTDSGTYTCSATNKAGHNQCSGHLTVKEPPYFVEKPQSQDVNPNTRVQLKALVGGTAPMTIKWFKDNKELHSGAARSVWKDDTSTSLELFAAKATDSGTYICQLSNDVGTATSKATLFVKEPPQFIKKPSPVLVLRNGQSTTFECQITGTPKIRVSWYLDGNEITAIQKHGISFIDGLATFQISGARVENSGTYVCEARNDAGTASCSIELKVKEPPTFIRELKPVEVVKYSDVELECEVTGTPPFEVTWLKNNREIRSSKKYTLTDRVSVFNLHITKCDPSDTGEYQCIVSNEGGSCSCSTRVALKEPPSFIKKIENTTTVLKSSATFQSTVAGSPPISITWLKDDQILDEDDNVYISFVDSVATLQIRSVDNGHSGRYTCQAKNESGVERCYAFLLVQEPAQIVEKAKSVDVTEKDPMTLECVVAGTPELKVKWLKDGKQIVPSRYFSMSFENNVASFRIQSVMKQDSGQYTFKVENDFGSSSCDAYLRVLDQNIPPSFTKKLTKMDKVLGSSIHMECKVSGSLPISAQWFKDGKEISTSAKYRLVCHERSVSLEVNNLELEDTANYTCKVSNVAGDDACSGILTVKEPPSFLVKPGRQQAIPDSTVEFKAILKGTPPFKIKWFKDDVELVSGPKCFIGLEGSTSFLNLYSVDASKTGQYTCHVTNDVGSDSCTTMLLVTEPPKFVKKLEASKIVKAGDSSRLECKIAGSPEIRVVWFRNEHELPASDKYRMTFIDSVAVIQMNNLSTEDSGDFICEAQNPAGSTSCSTKVIVKEPPVFSSFPPIVETLKNAEVSLECELSGTPPFEVVWYKDKRQLRSSKKYKIASKNFHTSIHILNVDTSDIGEYHCKAQNEVGSDTCVCTVKLKEPPRFVSKLNSLTVVAGEPAELQASIEGAQPIFVQWLKEKEEVIRESENIRITFVENVATLQFAKAEPANAGKYICQIKNDGGMRENMATLMVLEPAVIVEKAGPMTVTVGETCTLECKVAGTPELSVEWYKDGKLLTSSQKHKFSFYNKISSLRILSVERQDAGTYTFQVQNNVGKSSCTAVVDVSDRAVPPSFTRRLKNTGGVLGASCILECKVAGSSPISVAWFHEKTKIVSGAKYQTTFSDNVCTLQLNSLDSSDMGNYTCVAANVAGSDECRAVLTVQEPPSFVKEPEPLEVLPGKNVTFTSVIRGTPPFKVNWFRGARELVKGDRCNIYFEDTVAELELFNIDISQSGEYTCVVSNNAGQASCTTRLFVKEPAAFLKRLSDHSVEPGKSIILESTYTGTLPISVTWKKDGFNITTSEKCNIVTTEKTCILEILNSTKRDAGQYSCEIENEAGRDVCGALVSTLEPPYFVTELEPLEAAVGDSVSLQCQVAGTPEITVSWYKGDTKLRPTPEYRTYFTNNVATLVFNKVNINDSGEYTCKAENSIGTASSKTVFRIQERQLPPSFARQLKDIEQTVGLPVTLTCRLNGSAPIQVCWYRDGVLLRDDENLQTSFVDNVATLKILQTDLSHSGQYSCSASNPLGTASSSARLTAREPKKSPFFDIKPVSIDVIAGESADFECHVTGAQPMRITWSKDNKEIRPGGNYTITCVGNTPHLRILKVGKGDSGQYTCQATNDVGKDMCSAQLSVKEPPKFVKKLEASKVAKQGESIQLECKISGSPEIKVSWFRNDSELHESWKYNMSFINSVALLTINEASAEDSGDYICEAHNGVGDASCSTALTVKAPPVFTQKPSPVGALKGSDVILQCEISGTPPFEVVWVKDRKQVRNSKKFKITSKHFDTSLHILNLEASDVGEYHCKATNEVGSDTCSCSVKFKEPPRFVKKLSDTSTLIGDAVELRAIVEGFQPISVVWLKDRGEVIRESENTRISFIDNIATLQLGSPEASNSGKYICQIKNDAGMRECSAVLTVLEPARIIEKPEPMTVTTGNPFALECVVTGTPELSAKWFKDGRELSADSKHHITFINKVASLKIPCAEMSDKGLYSFEVKNSVGKSNCTVSVHVSDRIVPPSFIRKLKDVNAILGASVVLECRVSGSAPISVGWFQDGNEIVSGPKCQSSFSENVCTLNLSLLEPSDTGIYTCVAANVAGSDECSAVLTVQEPPSFEQTPDSVEVLPGMSLTFTSVIRGTPPFKVKWFKGSRELVPGESCNISLEDFVTELELFEVQPLESGDYSCLVTNDAGSASCTTHLFVKEPATFVKRLADFSVETGSPIVLEATYTGTPPISVSWIKDEYLISQSERCSITMTEKSTILEILESTIEDYAQYSCLIENEAGQDICEALVSVLEPPYFIEPLEHVEAVIGEPATLQCKVDGTPEIRISWYKEHTKLRSAPAYKMQFKNNVASLVINKVDHSDVGEYSCKADNSVGAVASSAVLVIKARKLPPFFARKLKDVHETLGFPVAFECRINGSEPLQVSWYKDGVLLKDDANLQTSFVHNVATLQILQTDQSHIGQYNCSASNPLGTASSSAKLILSEHEVPPFFDLKPVSVDLALGESGTFKCHVTGTAPIKITWAKDNREIRPGGNYKMTLVENTATLTVLKVGKGDAGQYTCYASNIAGKDSCSAQLGVQEPPRFIKKLEPSRIVKQDEFTRYECKIGGSPEIKVLWYKDETEIQESSKFRMSFVDSVAVLEMHNLSVEDSGDYTCEAHNAAGSASSSTSLKVKEPPIFRKKPHPIETLKGADVHLECELQGTPPFHVSWYKDKRELRSGKKYKIMSENFLTSIHILNVDAADIGEYQCKATNDVGSDTCVGSIALKAPPRFVKKLSDISTVVGKEVQLQTTIEGAEPISVVWFKDKGEIVRESDNIWISYSENIATLQFSRVEPANAGKYTCQIKNDAGMQECFATLSVLEPATIVEKPESIKVTTGDTCTLECTVAGTPELSTKWFKDGKELTSDNKYKISFFNKVSGLKIINVAPSDSGVYSFEVQNPVGKDSCTASLQVSDRTVPPSFTRKLKETNGLSGSSVVMECKVYGSPPISVSWFHEGNEISSGRKYQTTLTDNTCALTVNMLEESDSGDYTCIATNMAGSDECSAPLTVREPPSFVQKPDPMDVLTGTNVTFTSIVKGTPPFSVSWFKGSSELVPGDRCNVSLEDSVAELELFDVDTSQSGEYTCIVSNEAGKASCTTHLYIKAPAKFVKRLNDYSIEKGKPLILEGTFTGTPPISVTWKKNGINVTPSQRCNITTTEKSAILEIPSSTVEDAGQYNCYIENASGKDSCSAQILILEPPYFVKQLEPVKVSVGDSASLQCQLAGTPEIGVSWYKGDTKLRPTTTYKMHFRNNVATLVFNQVDINDSGEYICKAENSVGEVSASTFLTVQEQKLPPSFSRQLRDVQETVGLPVVFDCAISGSEPISVSWYKDGKPLKDSPNVQTSFLDNTATLNIFKTDRSLAGQYSCTATNPIGSASSSARLILTEGKNPPFFDIRLAPVDAVVGESADFECHVTGTQPIKVSWAKDSREIRSGGKYQISYLENSAHLTVLKVDKGDSGQYTCYAVNEVGKDSCTAQLNIKERLIPPSFTKRLSETVEETEGNSFKLEGRVAGSQPITVAWYKNNIEIQPTSNCEITFKNNTLVLQVRKAGMNDAGLYTCKVSNDAGSALCTSSIVIKEPKKPPVFDQHLTPVTVSEGEYVQLSCHVQGSEPIRIQWLKAGREIKPSDRCSFSFASGTAVLELRDVAKADSGDYVCKASNVAGSDTTKSKVTIKDKPAVAPATKKAAVDGRLFFVSEPQSIRVVEKTTATFIAKVGGDPIPNVKWTKGKWRQLNQGGRVFIHQKGDEAKLEIRDTTKTDSGLYRCVAFNEHGEIESNVNLQVDERKKQEKIEGDLRAMLKKTPILKKGAGEEEEIDIMELLKNVDPKEYEKYARMYGITDFRGLLQAFELLKQSQEEETHRLEIEEIERSERDEKEFEELVSFIQQRLSQTEPVTLIKDIENQTVLKDNDAVFEIDIKINYPEIKLSWYKGTEKLEPSDKFEISIDGDRHTLRVKNCQLKDQGNYRLVCGPHIASAKLTVIEPAWERHLQDVTLKEGQTCTMTCQFSVPNVKSEWFRNGRILKPQGRHKTEVEHKVHKLTIADVRAEDQGQYTCKYEDLETSAELRIEAEPIQFTKRIQNIVVSEHQSATFECEVSFDDAIVTWYKGPTELTESQKYNFRNDGRCHYMTIHNVTPDDEGVYSVIARLEPRGEARSTAELYLTTKEIKLELKPPDIPDSRVPIPTMPIRAVPPEEIPPVVAPPIPLLLPTPEEKKPPPKRIEVTKKAVKKDAKKVVAKPKEMTPREEIVKKPPPPTTLIPAKAPEIIDVSSKAEEVKIMTITRKKEVQKEKEAVYEKKQAVHKEKRVFIESFEEPYDELEVEPYTEPFEQPYYEEPDEDYEEIKVEAKKEVHEEWEEDFEEGQEYYEREEGYDEGEEEWEEAYQEREVIQVQKEVYEESHERKVPAKVPEKKAPPPPKVIKKPVIEKIEKTSRRMEEEKVQVTKVPEVSKKIVPQKPSRTPVQEEVIEVKVPAVHTKKMVISEEKMFFASHTEEEVSVTVPEVQKEIVTEEKIHVAISKRVEPPPKVPELPEKPAPEEVAPVPIPKKVEPPAPKVPEVPKKPVPEEKKPVPVPKKEPAAPPKVPEVPKKPVPEEKIPVPVAKKKEAPPAKVPEVQKGVVTEEKITIVTQREESPPPAVPEIPKKKVPEERKPVPRKEEEVPPPPKVPALPKKPVPEEKVAVPVPVAKKAPPPRAEVSKKTVVEEKRFVAEEKLSFAVPQRVEVTRHEVSAEEEWSYSEEEEGVSISVYREEEREEEEEAEVTEYEVMEEPEEYVVEEKLHIISKRVEAEPAEVTERQEKKIVLKPKIPAKIEEPPPAKVPEAPKKIVPEKKVPAPVPKKEKVPPPKVPEEPKKPVPEKKVPPKVIKMEEPLPAKVTERHMQITQEEKVLVAVTKKEAPPKARVPEEPKRAVPEEKVLKLKPKREEEPPAKVTEFRKRVVKEEKVSIEAPKREPQPIKEVTIMEEKERAYTLEEEAVSVQREEEYEEYEEYDYKEFEEYEPTEEYDQYEEYEEREYERYEEHEEYITEPEKPIPVKPVPEEPVPTKPKAPPAKVLKKAVPEEKVPVPIPKKLKPPPPKVPEEPKKVFEEKIRISITKREKEQVTEPAAKVPMKPKRVVAEEKVPVPRKEVAPPVRVPEVPKELEPEEVAFEEEVVTHVEEYLVEEEEEYIHEEEEFITEEEVVPVIPVKVPEVPRKPVPEEKKPVPVPKKKEAPPAKVPEVPKKPEEKVPVLIPKKEKPPPAKVPEVPKKPVPEEKVPVPVPKKVEAPPAKVPEVPKKPVPEKKVPVPAPKKVEAPPAKVPEVPKKLIPEEKKPTPVPKKVEAPPPKVPKKREPVPVPVALPQEEEVLFEEEIVPEEEVLPEEEEVLPEEEEVLPEEEEVLPEEEEIPPEEEEVPPEEEYVPEEEEFVPEEEVLPEVKPKVPVPAPVPEIKKKVTEKKVVIPKKEEAPPAKVPEVPKKVEEKRIILPKEEEVLPVEVTEEPEEEPISEEEIPEEPPSIEEVEEVAPPRVPEVIKKAVPEAPTPVPKKVEAPPAKVSKKIPEEKVPVPVQKKEAPPAKVPEVPKKVPEKKVLVPKKEAVPPAKGRTVLEEKVSVAFRQEVVVKERLELEVVEAEVEEIPEEEEFHEVEEYFEEGEFHEVEEFIKLEQHRVEEEHRVEKVHRVIEVFEAEEVEVFEKPKAPPKGPEISEKIIPPKKPPTKVVPRKEPPAKVPEVPKKIVVEEKVRVPEEPRVPPTKVPEVLPPKEVVPEKKVPVPPAKKPEAPPPKVPEAPKEVVPEKKVPVPPPKKPEVPPTKVPEVPKAAVPEKKVPEAIPPKPESPPPEVPEAPKEVVPEKKVPAAPPKKPEVTPVKVPEAPKEVVPEKKVPVPPPKKPEVPPTKVPEVPKVAVPEKKVPEAIPPKPESPPPEVFEEPEEVALEEPPAEVVEEPEPAAPPQVTVPPKKPVPEKKAPAVVAKKPELPPVKVPEVPKEVVPEKKVPLVVPKKPEAPPAKVPEVPKEVVPEKKVAVPKKPEVPPAKVPEVPKKPVLEEKPAVPVPERAESPPPEVYEEPEEIAPEEEIAPEEEKPVPVAEEEEPEVPPPAVPEEPKKIIPEKKVPVIKKPEAPPPKEPEPEKVIEKPKLKPRPPPPPPAPPKEDVKEKIFQLKAIPKKKVPEKPQVPEKVELTPLKVPGGEKKVRKLLPERKPEPKEEVVLKSVLRKRPEEEEPKVEPKKLEKVKKPAVPEPPPPKPVEEVEVPTVTKRERKIPEPTKVPEIKPAIPLPAPEPKPKPEAEVKTIKPPPVEPEPTPIAAPVTVPVVGKKAEAKAPKEEAAKPKGPIKGVPKKTPSPIEAERRKLRPGSGGEKPPDEAPFTYQLKAVPLKFVKEIKDIILTESEFVGSSAIFECLVSPSTAITTWMKDGSNIRESPKHRFIADGKDRKLHIIDVQLSDAGEYTCVLRLGNKEKTSTAKLVVEELPVRFVKTLEEEVTVVKGQPLYLSCELNKERDVVWRKDGKIVVEKPGRIVPGVIGLMRALTINDADDTDAGTYTVTVENANNLECSSCVKVVEVIRDWLVKPIRDQHVKPKGTAIFACDIAKDTPNIKWFKGYDEIPAEPNDKTEILRDGNHLYLKIKNAMPEDIAEYAVEIEGKRYPAKLTLGEREVELLKPIEDVTIYEKESASFDAEISEADIPGQWKLKGELLRPSPTCEIKAEGGKRFLTLHKVKLDQAGEVLYQALNAITTAILTVKEIELDFAVPLKDVTVPERRQARFECVLTREANVIWSKGPDIIKSSDKFDIIADGKKHILVINDSQFDDEGVYTAEVEGKKTSARLFVTGIRLKFMSPLEDQTVKEGETATFVCELSHEKMHVVWFKNDAKLHTSRTVLISSEGKTHKLEMKEVTLDDISQIKAQVKELSSTAQLKVLEADPYFTVKLHDKTAVEKDEITLKCEVSKDVPVKWFKDGEEIVPSPKYSIKADGLRRILKIKKADLKDKGEYVCDCGTDKTKANVTVEARLIKVEKPLYGVEVFVGETAHFEIELSEPDVHGQWKLKGQPLTASPDCEIIEDGKKHILILHNCQLGMTGEVSFQAANAKSAANLKVKELPLIFITPLSDVKVFEKDEAKFECEVSREPKTFRWLKGTQEITGDDRFELIKDGTKHSMVIKSAAFEDEAKYMFEAEDKHTSGKLIIEGIRLKFLTPLKDVTAKEKESAVFTVELSHDNIRVKWFKNDQRLHTTRSVSMQDEGKTHSITFKDLSIDDTSQIRVEAMGMSSEAKLTVLEGDPYFTGKLQDYTGVEKDEVILQCEISKADAPVKWFKDGKEIKPSKNAVIKADGKKRMLILKKALKSDIGQYTCDCGTDKTSGKLDIEDREIKLVRPLHSVEVMETETARFETEISEDDIHANWKLKGEALLQTPDCEIKEEGKIHSLVLHNCRLDQTGGVDFQAANVKSSAHLRVKPRVIGLLRPLKDVTVTAGETATFDCELSYEDIPVEWYLKGKKLEPSDKVVPRSEGKVHTLTLRDVKLEDAGEVQLTAKDFKTHANLFVKEPPVEFTKPLEDQTVEEGATAVLECEVSRENAKVKWFKNGTEILKSKKYEIVADGRVRKLVIHDCTPEDIKTYTCDAKDFKTSCNLNVVPPHVEFLRPLTDLQVREKEMARFECELSRENAKVKWFKDGAEIKKGKKYDIISKGAVRILVINKCLLDDEAEYSCEVRTARTSGMLTVLEEEAVFTKNLANIEVSETDTIKLVCEVSKPGAEVIWYKGDEEIIETGRYEILTEGRKRILVIQNAHLEDAGNYNCRLPSSRTDGKVKVHELAAEFISKPQNLEILEGEKAEFVCSISKESFPVQWKRDDKTLESGDKYDVIADGKKRVLVVKDATLQDMGTYVVMVGAARAAAHLTVIEKLRIVVPLKDTRVKEQQEVVFNCEVNTEGAKAKWFRNEEAIFDSSKYIILQKDLVYTLRIRDAHLDDQANYNVSLTNHRGENVKSAANLIVEEEDLRIVEPLKDIETMEKKSVTFWCKVNRLNVTLKWTKNGEEVPFDNRVSYRVDKYKHMLTIKDCGFPDEGEYIVTAGQDKSVAELLIIEAPTEFVEHLEDQTVTEFDDAVFSCQLSREKANVKWYRNGREIKEGKKYKFEKDGSIHRLIIKDCRLDDECEYACGVEDRKSRARLFVEEIPVEIIRPPQDILEAPGADVVFLAELNKDKVEVQWLRNNMVVVQGDKHQMMSEGKIHRLQICDIKPRDQGEYRFIAKDKEARAKLELAAAPKIKTADQDLVVDVGKPLTMVVPYDAYPKAEAEWFKENEPLSTKTIDTTAEQTSFRILEAKKGDKGRYKIVLQNKHGKAEGFINLKVIDVPGPVRNLEVTETFDGEVSLAWEEPLTDGGSKIIGYVVERRDIKRKTWVLATDRAESCEFTVTGLQKGGVEYLFRVSARNRVGTGEPVETDNPVEARSKYDVPGPPLNVTITDVNRFGVSLTWEPPEYDGGAEITNYVIELRDKTSIRWDTAMTVRAEDLSATVTDVVEGQEYSFRVRAQNRIGVGKPSAATPFVKVADPIERPSPPVNLTSSDQTQSSVQLKWEPPLKDGGSPILGYIIERCEEGKDNWIRCNMKLVPELTYKVTGLEKGNKYLYRVSAENKAGVSDPSEILGPLTADDAFVEPTMDLSAFKDGLEVIVPNPITILVPSTGYPRPTATWCFGDKVLETGDRVKMKTLSAYAELVISPSERSDKGIYTLKLENRVKTISGEIDVNVIARPSAPKELKFGDITKDSVHLTWEPPDDDGGSPLTGYVVEKREVSRKTWTKVMDFVTDLEFTVPDLVQGKEYLFKVCARNKCGPGEPAYVDEPVNMSTPATVPDPPENVKWRDRTANSIFLTWDPPKNDGGSRIKGYIVERCPRGSDKWVACGEPVAETKMEVTGLEEGKWYAYRVKALNRQGASKPSRPTEEIQAVDTQEAPEIFLDVKLLAGLTVKAGTKIELPATVTGKPEPKITWTKADMILKQDKRITIENVPKKSTVTIVDSKRSDTGTYIIEAVNVCGRATAVVEVNVLDKPGPPAAFDITDVTNESCLLTWNPPRDDGGSKITNYVVERRATDSEVWHKLSSTVKDTNFKATKLIPNKEYIFRVAAENMYGVGEPVQASPITAKYQFDPPGPPTRLEPSDITKDAVTLTWCEPDDDGGSPITGYWVERLDPDTDKWVRCNKMPVKDTTYRVKGLTNKKKYRFRVLAENLAGPGKPSKSTEPILIKDPIDPPWPPGKPTVKDVGKTSVRLNWTKPEHDGGAKIESYVIEMLKTGTDEWVRVAEGVPTTQHLLPGLMEGQEYSFRVRAVNKAGESEPSEPSDPVLCREKLYPPSPPRWLEVINITKNTADLKWTVPEKDGGSPITNYIVEKRDVRRKGWQTVDTTVKDTKCTVTPLTEGSLYVFRVAAENAIGQSDYTEIEDSVLAKDTFTTPGPPYALAVVDVTKRHVDLKWEPPKNDGGRPIQRYVIEKKERLGTRWVKAGKTAGPDCNFRVTDVIEGTEVQFQVRAENEAGVGHPSEPTEILSIEDPTSPPSPPLDLHVTDAGRKHIAIAWKPPEKNGGSPIIGYHVEMCPVGTEKWMRVNSRPIKDLKFKVEEGVVPDKEYVLRVRAVNAIGVSEPSEISENVVAKDPDCKPTIDLETHDIIVIEGEKLSIPVPFRAVPVPTVSWHKDGKEVKASDRLTMKNDHISAHLEVPKSVRADAGIYTITLENKLGSATASINVKVIGLPGPCKDIKASDITKSSCKLTWEPPEFDGGTPILHYVLERREAGRRTYIPVMSGENKLSWTVKDLIPNGEYFFRVKAVNKVGGGEYIELKNPVIAQDPKQPPDPPVDVEVHNPTAEAMTITWKPPLYDGGSKIMGYIIEKIAKGEERWKRCNEHLVPILTYTAKGLEEGKEYQFRVRAENAAGISEPSRATPPTKAVDPIDAPKVILRTSLEVKRGDEIALDASISGSPYPTITWIKDENVIVPEEIKKRAAPLVRRRKGEVQEEEPFVLPLTQRLSIDNSKKGESQLRVRDSLRPDHGLYMIKVENDHGIAKAPCTVSVLDTPGPPINFVFEDIRKTSVLCKWEPPLDDGGSEIINYTLEKKDKTKPDSEWIVVTSTLRHCKYSVTKLIEGKEYLFRVRAENRFGPGPPCVSKPLVAKDPFGPPDAPDKPIVEDVTSNSMLVKWNEPKDNGSPILGYWLEKREVNSTHWSRVNKSLLNALKANVDGLLEGLTYVFRVCAENAAGPGKFSPPSDPKTAHDPISPPGPPIPRVTDTSSTTIELEWEPPAFNGGGEIVGYFVDKQLVGTNEWSRCTEKMIKVRQYTVKEIREGADYKLRVSAVNAAGEGPPGETQPVTVAEPQEPPAVELDVSVKGGIQIMAGKTLRIPAVVTGRPVPTKVWTKEEGELDKDRVVIDNVGTKSELIIKDALRKDHGRYVITATNSCGSKFAAARVEVFDVPGPVLDLKPVVTNRKMCLLNWSDPEDDGGSEITGFIIERKDAKMHTWRQPIETERSKCDITGLLEGQEYKFRVIAKNKFGCGPPVEIGPILAVDPLGPPTSPERLTYTERTKSTITLDWKEPRSNGGSPIQGYIIEKRRHDKPDFERVNKRLCPTTSFLVENLDEHQMYEFRVKAVNEIGESEPSLPLNVVIQDDEVPPTIKLRLSVRGDTIKVKAGEPVHIPADVTGLPMPKIEWSKNETVIEKPTDALQITKEEVSRSEAKTELSIPKAVREDKGTYTVTASNRLGSVFRNVHVEVYDRPSPPRNLAVTDIKAESCYLTWDAPLDNGGSEITHYVIDKRDASRKKAEWEEVTNTAVEKRYGIWKLIPNGQYEFRVRAVNKYGISDECKSDKVVIQDPYRLPGPPGKPKVLARTKGSMLVSWTPPLDNGGSPITGYWLEKREEGSPYWSRVSRAPITKVGLKGVEFNVPRLLEGVKYQFRAMAINAAGIGPPSEPSDPEVAGDPIFPPGPPSCPEVKDKTKSSISLGWKPPAKDGGSPIKGYIVEMQEEGTTDWKRVNEPDKLITTCECVVPNLKELRKYRFRVKAVNEAGESEPSDTTGEIPATDIQEEPEVFIDIGAQDCLVCKAGSQIRIPAVIKGRPTPKSSWEFDGKAKKAMKDGVHDIPEDAQLETAENSSVIIIPECKRSHTGKYSITAKNKAGQKTANCRVKVMDVPGPPKDLKVSDITRGSCRLSWKMPDDDGGDRIKGYVIEKRTIDGKAWTKVNPDCGSTTFVVPDLLSEQQYFFRVRAENRFGIGPPVETIQRTTARDPIYPPDPPIKLKIGLITKNTVHLSWKPPKNDGGSPVTHYIVECLAWDPTGTKKEAWRQCNKRDVEELQFTVEDLVEGGEYEFRVKAVNAAGVSKPSATVGPVTVKDQTCPPSIDLKEFMEVEEGTNVNIVAKIKGVPFPTLTWFKAPPKKPDNKEPVLYDTHVNKLVVDDTCTLVIPQSRRSDTGLYTITAVNNLGTASKEMRLNVLGRPGPPVGPIKFESVSADQMTLSWFPPKDDGGSKITNYVIEKREANRKTWVHVSSEPKECTYTIPKLLEGHEYVFRIMAQNKYGIGEPLDSEPETARNLFSVPGAPDKPTVSSVTRNSMTVNWEEPEYDGGSPVTGYWLEMKDTTSKRWKRVNRDPIKAMTLGVSYKVTGLIEGSDYQFRVYAINAAGVGPASLPSDPATARDPIAPPGPPFPKVTDWTKSSADLEWSPPLKDGGSKVTGYIVEYKEEGKEEWEKGKDKEVRGTKLVVTGLKEGAFYKFRVRAVNIAGIGEPGEVTDVIEMKDRLVSPDLQLDASVRDRIVVHAGGVIRIIAYVSGKPPPTVTWNMNERTLPQEATIETTAISSSMVIKNCQRSHQGVYSLLAKNEAGERKKTIIVDVLDVPGPVGTPFLAHNLTNESCKLTWFSPEDDGGSPITNYVIEKRESDRRAWTPVTYTVTRQNATVQGLIQGKAYFFRIAAENSIGMGPFVETSEALVIREPITVPERPEDLEVKEVTKNTVTLTWNPPKYDGGSEIINYVLESRLIGTEKFHKVTNDNLLSRKYTVKGLKEGDTYEYRVSAVNIVGQGKPSFCTKPITCKDELAPPTLHLDFRDKLTIRVGEAFALTGRYSGKPKPKVSWFKDEADVLEDDRTHIKTTPATLALEKIKAKRSDSGKYCVVVENSTGSRKGFCQVNVVDRPGPPVGPVSFDEVTKDYMVISWKPPLDDGGSKITNYIIEKKEVGKDVWMPVTSASAKTTCKVSKLLEGKDYIFRIHAENLYGISDPLVSDSMKAKDRFRVPDAPDQPIVTEVTKDSALVTWNKPHDGGKPITNYILEKRETMSKRWARVTKDPIHPYTKFRVPDLLEGCQYEFRVSAENEIGIGDPSPPSKPVFAKDPIAKPSPPVNPEAIDTTCNSVDLTWQPPRHDGGSKILGYIVEYQKVGDEEWRRANHTPESCPETKYKVTGLRDGQTYKFRVLAVNAAGESDPAHVPEPVLVKDRLEPPELILDANMAREQHIKVGDTLRLSAIIKGVPFPKVTWKKEDRDAPTKARIDVTPVGSKLEIRNAAHEDGGIYSLTVENPAGSKTVSVKVLVLDKPGPPRDLEVSEIRKDSCYLTWKEPLDDGGSVITNYVVERRDVASAQWSPLSATSKKKSHFAKHLNEGNQYLFRVAAENQYGRGPFVETPKPIKALDPLHPPGPPKDLHHVDVDKTEVSLVWNKPDRDGGSPITGYLVEYQEEGTQDWIKFKTVTNLECVVTGLQQGKTYRFRVKAENIVGLGLPDTTIPIECQEKLVPPSVELDVKLIEGLVVKAGTTVRFPAIIRGVPVPTAKWTTDGSEIKTDEHYTVETDNFSSVLTIKNCLRRDTGEYQITVSNAAGSKTVAVHLTVLDVPGPPTGPINILDVTPEHMTISWQPPKDDGGSPVINYIVEKQDTRKDTWGVVSSGSSKTKLKIPHLQKGCEYVFRVRAENKIGVGPPLDSTPTVAKHKFSPPSPPGKPVVTDITENAATVSWTLPKSDGGSPITGYYMERREVTGKWVRVNKTPIADLKFRVTGLYEGNTYEFRVFAENLAGLSKPSPSSDPIKACRPIKPPGPPINPKLKDKSRETADLVWTKPLSDGGSPILGYVVECQKPGTAQWNRINKDELIRQCAFRVPGLIEGNEYRFRIKAANIVGEGEPRELAESVIAKDILHPPEVELDVTCRDVITVRVGQTIRILARVKGRPEPDITWTKEGKVLVREKRVDLIQDLPRVELQIKEAVRADHGKYIISAKNSSGHAQGSAIVNVLDRPGPCQNLKVTNVTKENCTISWENPLDNGGSEITNFIVEYRKPNQKGWSIVASDVTKRLIKANLLANNEYYFRVCAENKVGVGPTIETKTPILAINPIDRPGEPENLHIADKGKTFVYLKWRRPDYDGGSPNLSYHVERRLKGSDDWERVHKGSIKETHYMVDRCVENQIYEFRVQTKNEGGESDWVKTEEVVVKEDLQKPVLDLKLSGVLTVKAGDTIRLEAGVRGKPFPEVAWTKDKDATDLTRSPRVKIDTRADSSKFSLTKAKRSDGGKYVVTATNTAGSFVAYATVNVLDKPGPVRNLKIVDVSSDRCTVCWDPPEDDGGCEIQNYILEKCETKRMVWSTYSATVLTPGTTVTRLIEGNEYIFRVRAENKIGTGPPTESKPVIAKTKYDKPGRPDPPEVTKVSKEEMTVVWNPPEYDGGKSITGYFLEKKEKHSTRWVPVNKSAIPERRMKVQNLLPDHEYQFRVKAENEIGIGEPSLPSRPVVAKDPIEPPGPPTNFRVVDTTKHSITLGWGKPVYDGGAPIIGYVVEMRPKIADASPDEGWKRCNAAAQLVRKEFTVTSLDENQEYEFRVCAQNQVGIGRPAELKEAIKPKEILEPPEIDLDASMRKLVIVRAGCPIRLFAIVRGRPAPKVTWRKVGIDNVVRKGQVDLVDTMAFLVIPNSTRDDSGKYSLTLVNPAGEKAVFVNVRVLDTPGPVSDLKVSDVTKTSCHVSWAPPENDGGSQVTHYIVEKREADRKTWSTVTPEVKKTSFHVTNLVPGNEYYFRVTAVNEYGPGVPTDVPKPVLASDPLSEPDPPRKLEVTEMTKNSATLAWLPPLRDGGAKIDGYITSYREEEQPADRWTEYSVVKDLSLVVTGLKEGKKYKFRVAARNAVGVSLPREAEGVYEAKEQLLPPKILMPEQITIKAGKKLRIEAHVYGKPHPTCKWKKGEDEVVTSSHLAVHKADSSSILIIKDVTRKDSGYYSLTAENSSGTDTQKIKVVVMDAPGPPQPPFDISDIDADACSLSWHIPLEDGGSNITNYIVEKCDVSRGDWVTALASVTKTSCRVGKLIPGQEYIFRVRAENRFGISEPLTSPKMVAQFPFGVPSEPKNARVTKVNKDCIFVAWDRPDSDGGSPIIGYLIERKERNSLLWVKANDTLVRSTEYPCAGLVEGLEYSFRIYALNKAGSSPPSKPTEYVTARMPVDPPGKPEVIDVTKSTVSLIWARPKHDGGSKIIGYFVEACKLPGDKWVRCNTAPHQIPQEEYTATGLEEKAQYQFRAIARTAVNISPPSEPSDPVTILAENVPPRIDLSVAMKSLLTVKAGTNVCLDATVFGKPMPTVSWKKDGTLLKPAEGIKMAMQRNLCTLELFSVNRKDSGDYTITAENSSGSKSATIKLKVLDKPGPPASVKINKMYSDRAMLSWEPPLEDGGSEITNYIVDKRETSRPNWAQVSATVPITSCSVEKLIEGHEYQFRICAENKYGVGDPVFTEPAIAKNPYDPPGRCDPPVISNITKDHMTVSWKPPADDGGSPITGYLLEKRETQAVNWTKVNRKPIIERTLKATGLQEGTEYEFRVTAINKAGPGKPSDASKAAYARDPQYPPGPPAFPKVYDTTRSSVSLSWGKPAYDGGSPIIGYLVEVKRADSDNWVRCNLPQNLQKTRFEVTGLMEDTQYQFRVYAVNKIGYSDPSDVPDKHYPKDILIPPEGELDADLRKTLILRAGVTMRLYVPVKGRPPPKITWSKPNVNLRDRIGLDIKSTDFDTFLRCENVNKYDAGKYILTLENSCGKKEYTIVVKVLDTPGPPVNVTVKEISKDSAYVTWEPPIIDGGSPIINYVVQKRDAERKSWSTVTTECSKTSFRVANLEEGKSYFFRVFAENEYGIGDPGETRDAVKASQTPGPVVDLKVRSVSKSSCSIGWKKPHSDGGSRIIGYVVDFLTEENKWQRVMKSLSLQYSAKDLTEGKEYTFRVSAENENGEGTPSEITVVARDDVVAPDLDLKGLPDLCYLAKENSNFRLKIPIKGKPAPSVSWKKGEDPLATDTRVSVESSAVNTTLIVYDCQKSDAGKYTITLKNVAGTKEGTISIKVVGKPGIPTGPIKFDEVTAEAMTLKWAPPKDDGGSEITNYILEKRDSVNNKWVTCASAVQKTTFRVTRLHEGMEYTFRVSAENKYGVGEGLKSEPIVARHPFDVPDAPPPPNIVDVRHDSVSLTWTDPKKTGGSPITGYHLEFKERNSLLWKRANKTPIRMRDFKVTGLTEGLEYEFRVMAINLAGVGKPSLPSEPVVALDPIDPPGKPEVINITRNSVTLIWTEPKYDGGHKLTGYIVEKRDLPSKSWMKANHVNVPECAFTVTDLVEGGKYEFRIRAKNTAGAISAPSESTETIICKDEYEAPTIVLDPTIKDGLTIKAGDTIVLNAISILGKPLPKSSWSKAGKDIRPSDITQITSTPTSSMLTIKYATRKDAGEYTITATNPFGTKVEHVKVTVLDVPGPPGPVEISNVSAEKATLTWTPPLEDGGSPIKSYILEKRETSRLLWTVVSEDIQSCRHVATKLIQGNEYIFRVSAVNHYGKGEPVQSEPVKMVDRFGPPGPPEKPEVSNVTKNTATVSWKRPVDDGGSEITGYHVERREKKSLRWVRAIKTPVSDLRCKVTGLQEGSTYEFRVSAENRAGIGPPSEASDSVLMKDAAYPPGPPSNPHVTDTTKKSASLAWGKPHYDGGLEITGYVVEHQKVGDEAWIKDTTGTALRITQFVVPDLQTKEKYNFRISAINDAGVGEPAVIPDVEIVEREMAPDFELDAELRRTLVVRAGLSIRIFVPIKGRPAPEVTWTKDNINLKNRANIENTESFTLLIIPECNRYDTGKFVMTIENPAGKKSGFVNVRVLDTPGPVLNLRPTDITKDSVTLHWDLPLIDGGSRITNYIVEKREATRKSYSTATTKCHKCTYKVTGLSEGCEYFFRVMAENEYGIGEPTETTEPVKASEAPSPPDSLNIMDITKSTVSLAWPKPKHDGGSKITGYVIEAQRKGSDQWTHITTVKGLECVVRNLTEGEEYTFQVMAVNSAGRSAPRESRPVIVKEQTMLPELDLRGIYQKLVIAKAGDNIKVEIPVLGRPKPTVTWKKGDQILKQTQRVNFETTATSTILNINECVRSDSGPYPLTARNIVGEVGDVITIQVHDIPGPPTGPIKFDEVSSDFVTFSWDPPENDGGVPISNYVVEMRQTDSTTWVELATTVIRTTYKATRLTTGLEYQFRVKAQNRYGVGPGITSACIVANYPFKVPGPPGTPQVTAVTKDSMTISWHEPLSDGGSPILGYHVERKERNGILWQTVSKALVPGNIFKSSGLTDGIAYEFRVIAENMAGKSKPSKPSEPMLALDPIDPPGKPVPLNITRHTVTLKWAKPEYTGGFKITSYIVEKRDLPNGRWLKANFSNILENEFTVSGLTEDAAYEFRVIAKNAAGAISPPSEPSDAITCRDDVEAPKIKVDVKFKDTVILKAGEAFRLEADVSGRPPPTMEWSKDGKELEGTAKLEIKIADFSTNLVNKDSTRRDSGAYTLTATNPGGFAKHIFNVKVLDRPGPPEGPLAVTEVTSEKCVLSWFPPLDDGGAKIDHYIVQKRETSRLAWTNVASEVQVTKLKVTKLLKGNEYIFRVMAVNKYGVGEPLESEPVLAVNPYGPPDPPKNPEVTTITKDSMVVCWGHPDSDGGSEIINYIVERRDKAGQRWIKCNKKTLTDLRYKVSGLTEGHEYEFRIMAENAAGISAPSPTSPFYKACDTVFKPGPPGNPRVLDTSRSSISIAWNKPIYDGGSEITGYMVEIALPEEDEWQIVTPPAGLKATSYTITGLTENQEYKIRIYAMNSEGLGEPALVPGTPKAEDRMLPPEIELDADLRKVVTIRACCTLRLFVPIKGRPAPEVKWARDHGESLDKASIESTSSYTLLIVGNVNRFDSGKYILTVENSSGSKSAFVNVRVLDTPGPPQDLKVKEVTKTSVTLTWDPPLLDGGSKIKNYIVEKRESTRKAYSTVATNCHKTSWKVDQLQEGCSYYFRVLAENEYGIGLPAETAESVKASERPLPPGKITLMDVTRNSVSLSWEKPEHDGGSRILGYIVEMQTKGSDKWATCATVKVTEATITGLIQGEEYSFRVSAQNEKGISDPRQLSVPVIAKDLVIPPAFKLLFNTFTVLAGEDLKVDVPFIGRPTPAVTWHKDNVPLKQTTRVNAESTENNSLLTIKDACREDVGHYVVKLTNSAGEAIETLNVIVLDKPGPPTGPVKMDEVTADSITLSWGPPKYDGGSSINNYIVEKRDTSTTTWQIVSATVARTTIKACRLKTGCEYQFRIAAENRYGKSTYLNSEPTVAQYPFKVPGPPGTPVVTLSSRDSMEVQWNEPISDGGSRVIGYHLERKERNSILWVKLNKTPIPQTKFKTTGLEEGVEYEFRVSAENIVGIGKPSKVSECYVARDPCDPPGRPEAIIVTRNSVTLQWKKPTYDGGSKITGYIVEKKELPEGRWMKASFTNIIDTHFEVTGLVEDHRYEFRVIARNAAGVFSEPSESTGAITARDEVDPPRISMDPKYKDTIVVHAGESFKVDADIYGKPIPTIQWIKGDQELSNTARLEIKSTDFATSLSVKDAVRVDSGNYILKAKNVAGERSVTVNVKVLDRPGPPEGPVVISGVTAEKCTLAWKPPLQDGGSDIINYIVERRETSRLVWTVVDANVQTLSCKVTKLLEGNEYTFRIMAVNKYGVGEPLESEPVVAKNPFVVPDAPKAPEVTTVTKDSMIVVWERPASDGGSEILGYVLEKRDKEGIRWTRCHKRLIGELRLRVTGLIENHDYEFRVSAENAAGLSEPSPPSAYQKACDPIYKPGPPNNPKVIDITRSSVFLSWSKPIYDGGCEIQGYIVEKCDVSVGEWTMCTPPTGINKTNIEVEKLLEKHEYNFRICAINKAGVGEHADVPGPIIVEEKLEAPDIDLDLELRKIINIRAGGSLRLFVPIKGRPTPEVKWGKVDGEIRDAAIIDVTSSFTSLVLDNVNRYDSGKYTLTLENSSGTKSAFVTVRVLDTPSPPVNLKVTEITKDSVSITWEPPLLDGGSKIKNYIVEKREATRKSYAAVVTNCHKNSWKIDQLQEGCSYYFRVTAENEYGIGLPAQTADPIKVAEVPQPPGKITVDDVTRNSVSLSWTKPEHDGGSKIIQYIVEMQAKHSEKWSECARVKSLQAVITNLTQGEEYLFRVVAVNEKGRSDPRSLAVPIVAKDLVIEPDVKPAFSSYSVQVGQDLKIEVPISGRPKPTITWTKDGLPLKQTTRINVTDSLDLTTLSIKETHKDDGGQYGITVANVVGQKTASIEIVTLDKPDPPKGPVKFDDVSAESITLSWNPPLYTGGCQITNYIVQKRDTTTTVWDVVSATVARTTLKVTKLKTGTEYQFRIFAENRYGQSFALESDPIVAQYPYKEPGPPGTPFATAISKDSMVIQWHEPVNNGGSPVIGYHLERKERNSILWTKVNKTIIHDTQFKAQNLEEGIEYEFRVYAENIVGVGKASKNSECYVARDPCDPPGTPEPIMVKRNEITLQWTKPVYDGGSMITGYIVEKRDLPDGRWMKASFTNVIETQFTVSGLTEDQRYEFRVIAKNAAGAISKPSDSTGPITAKDEVELPRISMDPKFRDTIVVNAGETFRLEADVHGKPLPTIEWLRGDKEIEESARCEIKNTDFKALLIVKDAIRIDGGQYILRASNVAGSKSFPVNVKVLDRPGPPEGPVQVTGVTSEKCSLTWSPPLQDGGSDISHYVVEKRETSRLAWTVVASEVVTNSLKVTKLLEGNEYVFRIMAVNKYGVGEPLESAPVLMKNPFVLPGPPKSLEVTNIAKDSMTVCWNRPDSDGGSEIIGYIVEKRDRSGIRWIKCNKRRITDLRLRVTGLTEDHEYEFRVSAENAAGVGEPSPATVYYKACDPVFKPGPPTNAHIVDTTKNSITLAWGKPIYDGGSEILGYVVEICKADEEEWQIVTPQTGLRVTRFEISKLTEHQEYKIRVCALNKVGLGEATSVPGTVKPEDKLEAPELDLDSELRKGIVVRAGGSARIHIPFKGRPTPEITWSREEGEFTDKVQIEKGVNYTQLSIDNCDRNDAGKYILKLENSSGSKSAFVTVKVLDTPGPPQNLAVKEVRKDSAFLVWEPPIIDGGAKVKNYVIDKRESTRKAYANVSSKCSKTSFKVENLTEGAIYYFRVMAENEFGVGVPVETVDAVKAAEPPSPPGKVTLTDVSQTSASLMWEKPEHDGGSRVLGYVVEMQPKGTEKWSIVAESKVCNAVVTGLSSGQEYQFRVKAYNEKGKSDPRVLGVPVIAKDLTIQPSLKLPFNTYSIQAGEDLKIEIPVIGRPRPNISWVKDGEPLKQTTRVNVEETATSTVLHIKEGNKDDFGKYTVTATNSAGTATENLSVIVLEKPGPPVGPVRFDEVSADFVVISWEPPAYTGGCQISNYIVEKRDTTTTTWHMVSATVARTTIKITKLKTGTEYQFRIFAENRYGKSAPLDSKAVIVQYPFKEPGPPGTPFVTSISKDQMLVQWHEPVNDGGTKIIGYHLEQKEKNSILWVKLNKTPIQDTKFKTTGLDEGLEYEFKVSAENIVGIGKPSKVSECFVARDPCDPPGRPEAIVITRNNVTLKWKKPAYDGGSKITGYIVEKKDLPDGRWMKASFTNVLETEFTVSGLVEDQRYEFRVIARNAAGNFSEPSDSSGAITARDEIDAPNASLDPKYKDVIVVHAGETFVLEADIRGKPIPDVVWSKDGKELEETAARMEIKSTIQKTTLVVKDCIRTDGGQYILKLSNVGGTKSIPITVKVLDRPGPPEGPLKVTGVTAEKCYLAWNPPLQDGGANISHYIIEKRETSRLSWTQVSTEVQALNYKVTKLLPGNEYIFRVMAVNKYGIGEPLESGPVTACNPYKPPGPPSTPEVSAITKDSMVVTWARPVDDGGTEIEGYILEKRDKEGVRWTKCNKKTLTDLRLRVTGLTEGHSYEFRVAAENAAGVGEPSEPSVFYRACDALYPPGPPSNPKVTDTSRSSVSLAWSKPIYDGGAPVKGYVVEVKEAAADEWTTCTPPTGLQGKQFTVTKLKENTEYNFRICAINSEGVGEPATLPGSVVAQERIEPPEIELDADLRKVVVLRASATLRLFVTIKGRPEPEVKWEKAEGILTDRAQIEVTSSFTMLVIDNVTRFDSGRYNLTLENNSGSKTAFVNVRVLDSPSAPVNLTIREVKKDSVTLSWEPPLIDGGAKITNYIVEKRETTRKAYATITNNCTKTTFRIENLQEGCSYYFRVLASNEYGIGLPAETTEPVKVSEPPLPPGRVTLVDVTRNTATIKWEKPESDGGSKITGYVVEMQTKGSEKWSTCTQVKTLEATISGLTAGEEYVFRVAAVNEKGRSDPRQLGVPVIARDIEIKPSVELPFHTFNVKAREQLKIDVPFKGRPQATVNWRKDGQTLKETTRVNVSSSKTVTSLSIKEASKEDVGTYELCVSNSAGSITVPITIIVLDRPGPPGPIRIDEVSCDSITISWNPPEYDGGCQISNYIVEKKETTSTTWHIVSQAVARTSIKIVRLTTGSEYQFRVCAENRYGKSSYSESSAVVAEYPFSPPGPPGTPKVVHATKSTMLVTWQVPVNDGGSRVIGYHLEYKERSSILWSKANKILIADTQMKVSGLDEGLMYEYRVYAENIAGIGKCSKSCEPVPARDPCDPPGQPEVTNITRKSVSLKWSKPHYDGGAKITGYIVERRELPDGRWLKCNYTNIQETYFEVTELTEDQRYEFRVFARNAADSVSEPSESTGPIIVKDDVEPPRVMMDVKFRDVIVVKAGEVLKINADIAGRPLPVISWAKDGIEIEERARTEIISTDNHTLLTVKDCIRRDTGQYVLTLKNVAGTRSVAVNCKVLDKPGPPAGPLEINGLTAEKCSLSWGRPQEDGGADIDYYIVEKRETSHLAWTICEGELQMTSCKVTKLLKGNEYIFRVTGVNKYGVGEPLESVAIKALDPFTVPSPPTSLEITSVTKESMTLCWSRPESDGGSEISGYIIERREKNSLRWVRVNKKPVYDLRVKSTGLREGCEYEYRVYAENAAGLSLPSETSPLIRAEDPVFLPSPPSKPKIVDSGKTTITIAWVKPLFDGGAPITGYTVEYKKSDDTDWKTSIQSLRGTEYTISGLTTGAEYVFRVKSVNKVGASDPSDSSDPQIAKEREEEPLFDIDSEMRKTLIVKAGASFTMTVPFRGRPVPNVLWSKPDTDLRTRAYVDTTDSRTSLTIENANRNDSGKYTLTIQNVLSAASLTLVVKVLDTPGPPTNITVQDVTKESAVLSWDVPENDGGAPVKNYHIEKREASKKAWVSVTNNCNRLSYKVTNLQEGAIYYFRVSGENEFGVGIPAETKEGVKITEKPSPPEKLGVTSISKDSVSLTWLKPEHDGGSRIVHYVVEALEKGQKNWVKCAVAKSTHHVVSGLRENSEYFFRVFAENQAGLSDPRELLLPVLIKEQLEPPEIDMKNFPSHTVYVRAGSNLKVDIPISGKPLPKVTLSRDGVPLKATMRFNTEITAENLTINLKESVTADAGRYEITAANSSGTTKAFINIVVLDRPGPPTGPVVISDITEESVTLKWEPPKYDGGSQVTNYILLKRETSTAVWTEVSATVARTMMKVMKLTTGEEYQFRIKAENRFGISDHIDSACVTVKLPYTTPGPPSTPWVTNVTRESITVGWHEPVSNGGSAVVGYHLEMKDRNSILWQKANKLVIRTTHFKVTTISAGLIYEFRVYAENAAGVGKPSHPSEPVLAIDACEPPRNVRITDISKNSVSLSWQQPAFDGGSKITGYIVERRDLPDGRWTKASFTNVTETQFIISGLTQNSQYEFRVFARNAVGSISNPSEVVGPITCIDSYGGPVIDLPLEYTEVVKYRAGTSVKLRAGISGKPAPTIEWYKDDKELQTNALVCVENTTDLASILIKDADRLNSGCYELKLRNAMGSASATIRVQILDKPGPPGGPIEFKTVTAEKITLLWRPPADDGGAKITHYIVEKRETSRVVWSMVSEHLEECIITTTKIIKGNEYIFRVRAVNKYGIGEPLESDSVVAKNAFVTPGPPGIPEVTKITKNSMTVVWSRPIADGGSDISGYFLEKRDKKSLGWFKVLKETIRDTRQKVTGLTENSDYQYRVCAVNAAGQGPFSEPSEFYKAADPIDPPGPPAKIRIADSTKSSITLGWSKPVYDGGSAVTGYVVEIRQGEEEEWTTVSTKGEVRTTEYVVSNLKPGVNYYFRVSAVNCAGQGEPIEMNEPVQAKDILEAPEIDLDVALRTSVIAKAGEDVQVLIPFKGRPPPTVTWRKDEKNLGSDARYSIENTDSSSLLTIPQVTRNDTGKYILTIENGVGEPKSSTVSVKVLDTPAACQKLQVKHVSRGTVTLLWDPPLIDGGSPIINYVIEKRDATKRTWSVVSHKCSSTSFKLIDLSEKTPFFFRVLAENEIGIGEPCETTEPVKAAEVPAPIRDLSMKDSTKTSVILSWTKPDFDGGSVITEYVVERKGKGEQTWSHAGISKTCEIEVSQLKEQSVLEFRVFAKNEKGLSDPVTIGPITVKELIITPEVDLSDIPGAQVTVRIGHNVHLELPYKGKPKPSISWLKDGLPLKESEFVRFSKTENKITLSIKNAKKEHGGKYTVILDNAVCRIAVPITVITLGPPSKPKGPIRFDEIKADSVILSWDVPEDNGGGEITCYSIEKRETSQTNWKMVCSSVARTTFKVPNLVKDAEYQFRVRAENRYGVSQPLVSSIIVAKHQFRIPGPPGKPVIYNVTSDGMSLTWDAPVYDGGSEVTGFHVEKKERNSILWQKVNTSPISGREYRATGLVEGLDYQFRVYAENSAGLSSPSDPSKFTLAVSPVDPPGTPDYIDVTRETITLKWNPPLRDGGSKIVGYSIEKRQGNERWVRCNFTDVSECQYTVTGLSPGDRYEFRIIARNAVGTISPPSQSSGIIMTRDENVPPIVEFGPEYFDGLIIKSGESLRIKALVQGRPVPRVTWFKDGVEIEKRMNMEITDVLGSTSLFVRDATRDHRGVYTVEAKNASGSAKAEIKVKVQDTPGKVVGPIRFTNITGEKMTLWWDAPLNDGCAPITHYIIEKRETSRLAWALIEDKCEAQSYTAIKLINGNEYQFRVSAVNKFGVGRPLDSDPVVAQIQYTVPDAPGIPEPSNITGNSITLTWARPESDGGSEIQQYILERREKKSTRWVKVISKRPISETRFKVTGLTEGNEYEFHVMAENAAGVGPASGISRLIKCREPVNPPGPPTVVKVTDTSKTTVSLEWSKPVFDGGMEIIGYIIEMCKADLGDWHKVNAEACVKTRYTVTDLQAGEEYKFRVSAINGAGKGDSCEVTGTIKAVDRLTAPELDIDANFKQTHVVRAGASIRLFIAYQGRPTPTAVWSKPDSNLSLRADIHTTDSFSTLTVENCNRNDAGKYTLTVENNSGSKSITFTVKVLDTPGPPGPITFKDVTRGSATLMWDAPLLDGGARIHHYVVEKREASRRSWQVISEKCTRQIFKVNDLAEGVPYYFRVSAVNEYGVGEPYEMPEPIVATEQPAPPRRLDVVDTSKSSAVLAWLKPDHDGGSRITGYLLEMRQKGSDFWVEAGHTKQLTFTVERLVEKTEYEFRVKAKNDAGYSEPREAFSSVIIKEPQIEPTADLTGITNQLITCKAGSPFTIDVPISGRPAPKVTWKLEEMRLKETDRVSITTTKDRTTLTVKDSMRGDSGRYFLTLENTAGVKTFSVTVVVIGRPGPVTGPIEVSSVSAESCVLSWGEPKDGGGTEITNYIVEKRESGTTAWQLVNSSVKRTQIKVTHLTKYMEYSFRVSSENRFGVSKPLESAPIIAEHPFVPPSAPTRPEVYHVSANAMSIRWEEPYHDGGSKIIGYWVEKKERNTILWVKENKVPCLECNYKVTGLVEGLEYQFRTYALNAAGVSKASEASRPIMAQNPVDAPGRPEVTDVTRSTVSLIWSAPAYDGGSKVVGYIIERKPVSEVGDGRWLKCNYTIVSDNFFTVTALSEGDTYEFRVLAKNAAGVISKGSESTGPVTCRDEYAPPKAELDARLHGDLVTIRAGSDLVLDAAVGGKPEPKIIWTKGDKELDLCEKVSLQYTGKRATAVIKFCDRSDSGKYTLTVKNASGTKAVSVMVKVLDSPGPCGKLTVSRVTQEKCTLAWSLPQEDGGAEITHYIVERRETSRLNWVIVEGECPTLSYVVTRLIKNNEYIFRVRAVNKYGPGVPVESEPIVARNSFTIPSPPGIPEEVGTGKEHIIIQWTKPESDGGNEISNYLVDKREKKSLRWTRVNKDYVVYDTRLKVTSLMEGCDYQFRVTAVNAAGNSEPSEASNFISCREPSYTPGPPSAPRVVDTTKHSISLAWTKPMYDGGTDIVGYVLEMQEKDTDQWYRVHTNATIRNTEFTVPDLKMGQKYSFRVAAVNVKGMSEYSESIAEIEPVERIEIPDLELADDLKKTVTIRAGASLRLMVSVSGRPPPVITWSKQGIDLASRAIIDTTESYSLLIVDKVNRYDAGKYTIEAENQSGKKSATVLVKVYDTPGPCPSVKVKEVSRDSVTITWEIPTIDGGAPVNNYIVEKREAAMRAFKTVTTKCSKTLYRISGLVEGTMYYFRVLPENIYGIGEPCETSDAVLVSEVPLVPAKLEVVDVTKSTVTLAWEKPLYDGGSRLTGYVLEACKAGTERWMKVVTLKPTVLEHTVTSLNEGEQYLFRIRAQNEKGVSEPRETVTAVTVQDLRVLPTIDLSTMPQKTIHVPAGRPVELVIPIAGRPPPAASWFFAGSKLRESERVTVETHTKVAKLTIRETTIRDTGEYTLELKNVTGTTSETIKVIILDKPGPPTGPIKIDEIDATSITISWEPPELDGGAPLSGYVVEQRDAHRPGWLPVSESVTRSTFKFTRLTEGNEYVFRVAATNRFGIGSYLQSEVIECRSSIRIPGPPETLQIFDVSRDGMTLTWYPPEDDGGSQVTGYIVERKEVRADRWVRVNKVPVTMTRYRSTGLTEGLEYEHRVTAINARGSGKPSRPSKPIVAMDPIAPPGKPQNPRVTDTTRTSVSLAWSVPEDEGGSKVTGYLIEMQKVDQHEWTKCNTTPTKIREYTLTHLPQGAEYRFRVLACNAGGPGEPAEVPGTVKVTEMLEYPDYELDERYQEGIFVRQGGVIRLTIPIKGKPFPICKWTKEGQDISKRAMIATSETHTELVIKEADRGDSGTYDLVLENKCGKKAVYIKVRVIGSPNSPEGPLEYDDIQVRSVRVSWRPPADDGGADILGYILERREVPKAAWYTIDSRVRGTSLVVKGLKENVEYHFRVSAENQFGISKPLKSEEPVTPKTPLNPPEPPSNPPEVLDVTKSSVSLSWSRPKDDGGSRVTGYYIERKETSTDKWVRHNKTQITTTMYTVTGLVPDAEYQFRIIAQNDVGLSETSPASEPVVCKDPFDKPSQPGELEILSISKDSVTLQWEKPECDGGKEILGYWVEYRQSGDSAWKKSNKERIKDKQFTIGGLLEATEYEFRVFAENETGLSRPRRTAMSIKTKLTSGEAPGIRKEMKDVTTKLGEAAQLSCQIVGRPLPDIKWYRFGKELIQSRKYKMSSDGRTHTLTVMTEEQEDEGVYTCIATNEVGEVETSSKLLLQATPQFHPGYPLKEKYYGAVGSTLRLHVMYIGRPVPAMTWFHGQKLLQNSENITIENTEHYTHLVMKNVQRKTHAGKYKVQLSNVFGTVDAILDVEIQDKPDKPTGPIVIEALLKNSAVISWKPPADDGGSWITNYVVEKCEAKEGAEWQLVSSAISVTTCRIVNLTENAGYYFRVSAQNTFGISDPLEVSSVVIIKSPFEKPGAPGKPTITAVTKDSCVVAWKPPASDGGAKIRNYYLEKREKKQNKWISVTTEEIRETVFSVKNLIEGLEYEFRVKCENLGGESEWSEISEPITPKSDVPIQAPHFKEELRNLNVRYQSNATLVCKVTGHPKPIVKWYRQGKEIIADGLKYRIQEFKGGYHQLIIASVTDDDATVYQVRATNQGGSVSGTASLEVEVPAKIHLPKTLEGMGAVHALRGEVVSIKIPFSGKPDPVITWQKGQDLIDNNGHYQVIVTRSFTSLVFPNGVERKDAGFYVVCAKNRFGIDQKTVELDVADVPDPPRGVKVSDVSRDSVNLTWTEPASDGGSKITNYIVEKCATTAERWLRVGQARETRYTVINLFGKTSYQFRVIAENKFGLSKPSEPSEPTITKEDKTRAMNYDEEVDETREVSMTKASHSSTKELYEKYMIAEDLGRGEFGIVHRCVETSSKKTYMAKFVKVKGTDQVLVKKEISILNIARHRNILHLHESFESMEELVMIFEFISGLDIFERINTSAFELNEREIVSYVHQVCEALQFLHSHNIGHFDIRPENIIYQTRRSSTIKIIEFGQARQLKPGDNFRLLFTAPEYYAPEVHQHDVVSTATDMWSLGTLVYVLLSGINPFLAETNQQIIENIMNAEYTFDEEAFKEISIEAMDFVDRLLVKERKSRMTASEALQHPWLKQKIERVSTKVIRTLKHRRYYHTLIKKDLNMVVSAARISCGGAIRSQKGVSVAKVKVASIEIGPVSGQIMHAVGEEGGHVKYVCKIENYDQSTQVTWYFGVRQLENSEKYEITYEDGVAILYVKDITKLDDGTYRCKVVNDYGEDSSYAELFVKGVREVYDYYCRRTMKKIKRRTDTMRLLERPPEFTLPLYNKTAYVGENVRFGVTITVHPEPHVTWYKSGQKIKPGDNDKKYTFESDKGLYQLTINSVTTDDDAEYTVVARNKYGEDSCKAKLTVTLHPPPTDSTLRPMFKRLLANAECQEGQSVCFEIRVSGIPPPTLKWEKDGQPLSLGPNIEIIHEGLDYYALHIRDTLPEDTGYYRVTATNTAGSTSCQAHLQVERLRYKKQEFKSKEEHERHVQKQIDKTLRMAEILSGTESVPLTQVAKEALREAAVLYKPAVSTKTVKGEFRLEIEEKKEERKLRMPYDVPEPRKYKQTTIEEDQRIKQFVPMSDMKWYKKIRDQYEMPGKLDRVVQKRPKRIRLSRWEQFYVMPLPRITDQYRPKWRIPKLSQDDLEIVRPARRRTPSPDYDFYYRPRRRSLGDISDEELLLPIDDYLAMKRTEEERLRLEEELELGFSASPPSRSPPHFELSSLRYSSPQAHVKVEETRKDFRYSTYHIPTKAEASTSYAELRERHAQAAYRQPKQRQRIMAEREDEELLRPVTTTQHLSEYKSELDFMSKEEKSRKKSRRQREVTEITEIEEEYEISKHAQRESSSSASRLLRRRRSLSPTYIELMRPVSELIRSRPQPAEEYEDDTERRSPTPERTRPRSPSPVSSERSLSRFERSARFDIFSRYESMKAALKTQKTSERKYEVLSQQPFTLDHAPRITLRMRSHRVPCGQNTRFILNVQSKPTAEVKWYHNGVELQESSKIHYTNTSGVLTLEILDCHTDDSGTYRAVCTNYKGEASDYATLDVTGGDYTTYASQRRDEEVPRSVFPELTRTEAYAVSSFKKTSEMEASSSVREVKSQMTETRESLSSYEHSASAEMKSAALEEKSLEEKSTTRKIKTTLAARILTKPRSMTVYEGESARFSCDTDGEPVPTVTWLRKGQVLSTSARHQVTTTKYKSTFEISSVQASDEGNYSVVVENSEGKQEAEFTLTIQKARVTEKAVTSPPRVKSPEPRVKSPEAVKSPKRVKSPEPSHPKAVSPTETKPTPTEKVQHLPVSAPPKITQFLKAEASKEIAKLTCVVESSVLRAKEVTWYKDGKKLKENGHFQFHYSADGTYELKINNLTESDQGEYVCEISGEGGTSKTNLQFMGQAFKSIHEKVSKISETKKSDQKTTESTVTRKTEPKAPEPISSKPVIVTGLQDTTVSSDSVAKFAVKATGEPRPTAIWTKDGKAITQGGKYKLSEDKGGFFLEIHKTDTSDSGLYTCTVKNSAGSVSSSCKLTIKAIKDTEAQKVSTQKTSEITPQKKAVVQEEISQKALRSEEIKMSEAKSQEKLALKEEASKVLISEEVKKSAATSLEKSIVHEEITKTSQASEEVRTHAEIKAFSTQMSINEGQRLVLKANIAGATDVKWVLNGVELTNSEEYRYGVSGSDQTLTIKQASHRDEGILTCISKTKEGIVKCQYDLTLSKELSDAPAFISQPRSQNINEGQNVLFTCEISGEPSPEIEWFKNNLPISISSNVSISRSRNVYSLEIRNASVSDSGKYTIKAKNFRGQCSATASLMVLPLVEEPSREVVLRTSGDTSLQGSFSSQSVQMSASKQEASFSSFSSSSASSMTEMKFASMSAQSMSSMQESFVEMSSSSFMGISNMTQLESSTSKMLKAGIRGIPPKIEALPSDISIDEGKVLTVACAFTGEPTPEVTWSCGGRKIHSQEQGRFHIENTDDLTTLIIMDVQKQDGGLYTLSLGNEFGSDSATVNIHIRSI

SEQ ID NO: 236 - protein, 4646 aa, Homo sapiens [sequence omitted]

SEQ ID NO: 237 - protein, 2363 aa, Homo sapiens
MEEVPGDALCEHFEANILTQNRCQNCFHPEEAHGARYQELRSPSGAEVPYCDLPRCPPAPEDPLSASTSGCQSVVDPGLRPGPKRGPSPSAGLPEEGPTAAPRSRSRELEAVPYLEGLTTSLCGSCNEDPGSDPTSSPDSATPDDTSNSSSVDWDTVERQEEEAPSWDELAVMIPRRPREGPRADSSQRAPSLLTRSPVGGDAAGQKKEDTGGGGRSAGQHWARLRGESGLSLERHRSTLTQASSMTPHSGPRSTTSQASPAQRDTAQAASTREIPRASSPHRITQRDTSRASSTQQEISRASSTQQETSRASSTQEDTPRASSTQEDTPRASSTQWNTPRASSPSRSTQLDNPRTSSTQQDNPQTSFPTCTPQRENPRTPCVQQDDPRASSPNRTTQRENSRTSCAQRDNPKASRTSSPNRATRDNPRTSCAQRDNPRASSPSRATRDNPTTSCAQRDNPRASRTSSPNRATRDNPRTSCAQRDNPRASSPSRATRDNPTTSCAQRDNPRASRTSSPNRATRDNPRTSCAQRDNPRASSPNRAARDNPTTSCAQRDNPRASRTSSPNRATRDNPRTSCAQRDNPRASSPNRATRDNPTTSCAQRDNPRASRTSSPNRATRDNPRTSCAQRDNPRASSPNRTTQQDSPRTSCARRDDPRASSPNRTIQQENPRTSCALRDNPRASSPSRTIQQENPRTSCAQRDDPRASSPNRTTQQENPRTSCARRDNPRASSRNRTIQRDNPRTSCAQRDNPRASSPNRTIQQENLRTSCTRQDNPRTSSPNRATRDNPRTSCAQRDNLRASSPIRATQQDNPRTCIQQNIPRSSSTQQDNPKTSCTKRDNLRPTCTQRDRTQSFSFQRDNPGTSSSQCCTQKENLRPSSPHRSTQWNNPRNSSPHRTNKDIPWASFPLRPTQSDGPRTSSPSRSKQSEVPWASIALRPTQGDRPQTSSPSRPAQHDPPQSSFGPTQYNLPSRATSSSHNPGHQSTSRTSSPVYPAAYGAPLTSPEPSQPPCAVCIGHRDAPRASSPPRYLQHDPFPFFPEPRAPESEPPHHEPPYIPPAVCIGHRDAPRASSPPRHTQFDPFPFLPDTSDAEHQCQSPQHEPLQLPAPVCIGYRDAPRASSPPRQAPEPSLLFQDLPRASTESLVPSMDSLHECPHIPTPVCIGHRDAPSFSSPPRQAPEPSLFFQDPPGTSMESLAPSTDSLHGSPVLIPQVCIGHRDAPRASSPPRHPPSDLAFLAPSPSPGSSGGSRGSAPPGETRHNLEREEYTVLADLPPPRRLAQRQPGPQAQCSSGGRTHSPGRAEVERLFGQERRKSEAAGAFQAQDEGRSQQPSQGQSQLLRRQSSPAPSRQVTMLPAKQAELTRRSQAEPPHPWSPEKRPEGDRQLQGSPLPPRTSARTPERELRTQRPLESGQAGPRQPLGVWQSQEEPPGSQGPHRHLERSWSSQEGGLGPGGWWGCGEPSLGAAKAPEGAWGGTSREYKESWGQPEAWEEKPTHELPRELGKRSPLTSPPENWGGPAESSQSWHSGTPTAVGWGAEGACPYPRGSERRPELDWRDLLGLLRAPGEGVWARVPSLDWEGLLELLQARLPRKDPAGHRDDLARALGPELGPPGTNDVPEQESHSQPEGWAEATPVNGHSPALQSQSPVQLPSACTSTQWPKIKVTRGPATATLAGLEQTGPLGSRSTAKGPSLPELQFQPEEPEESEPSRGDPLTDQKQADSADKRPAEGKAGSPLKGRLVTSWRMPGDRPTLFNPFLLSLGVLRWRRPDLLNFKKGWMSILDEPGEPPSPSLTTTSTSQWKKHWFVLTDSSLKYYRDSTAEEADELDGEIDLRSCTDVTEYAVQRNYGFQIHTKDAVYTLSAMTSGIRRNWIEALRKTVRPTSAPDVTKLSDSNKENALHSYSTQKGPLKAGEQRAGSEVISRGGPRKADGQRQALDYVELSPLTQASPQRARTPARTPDRLAKQEELERDLAQRSEERRKWFEATDSRTPEVPAGEGPRRGLGAPLTEDQQNRLSEEIEKKWQELEKLPLRENKRVPLTALLNQSRGERRGPPSDGHEALEKEVQALRAQLEAWRLQGEAPQSALRSQEDGHIPPGYISQEACERSLAEMESSHQQVMEELQRHHERELQRLQQEKEWLLAEETAATASAIEAMKKAYQEELSRELSKTRSLQQGPDGLRKQHQSDVEALKRELQVLSEQYSQKCLEIGALMRQAEEREHTLRRCQQEGQELLRHNQELHGRLSEEIDQLRGFIASQGMGNGCGRSNERSSCELEVLLRVKENELQYLKKEVQCLRDELQMMQKDKRFTSGKYQDVYVELSHIKTRSEREIEQLKEHLRLAMAALQEKESMRNSLAE

SEQ ID NO: 238 - protein, 2554 aa, Homo sapiens
MTATTRGSPVGGNDNQGQAPDGQSQPPLQQNQTSSPDSSNENSPATPPDEQGQGDAPPQLEDEEPAFPHTDLAKLDDMINRPRWVVPVLPKGELEVLLEAAIDLSKKGLDVKSEACQRFFRDGLTISFTKILTDEAVSGWKFEIHRCIINNTHRLVELCVAKLSQDWFPLLELLAMALNPHCKFHIYNGTRPCESVSSSVQLPEDELFARSPDPRSPKGWLVDLLNKFGTLNGFQILHDRFINGSALNVQIIAALIKPFGQCYEFLTLHTVKKYFLPIIEMVPQFLENLTDEELKKEAKNEAKNDALSMIIKSLKNLASRVPGQEETVKNLEIFRLKMILRLLQISSFNGKMNALNEVNKVISSVSYYTHRHGNPEEEEWLTAERMAEWIQQNNILSIVLRDSLHQPQYVEKLEKILRFVIKEKALTLQDLDNIWAAQAGKHEAIVKNVHDLLAKLAWDFSPEQLDHLFDCFKASWTNASKKQREKLLELIRRLAEDDKDGVMAHKVLNLLWNLAHSDDVPVDIMDLALSAHIKILDYSCSQDRDTQKIQWIDRFIEELRTNDKWVIPALKQIREICSLFGEAPQNLSQTQRSPHVFYRHDLINQLQHNHALVTLVAENLATYMESMRLYARDHEDYDPQTVRLGSRYSHVQEVQERLNFLRFLLKDGQLWLCAPQAKQIWKCLAENAVYLCDREACFKWYSKLMGDEPDLDPDINKDFFESNVLQLDPSLLTENGMKCFERFFKAVNCREGKLVAKRRAYMMDDLELIGLDYLWRVVIQSNDDIASRAIDLLKEIYTNLGPRLQVNQVVIHEDFIQSCFDRLKASYDTLCVLDGDKDSVNCARQEAVRMVRVLTVLREYINECDSDYHEERTILPMSRAFRGKHLSFVVRFPNQGRQVDDLEVWSHTNDTIGSVRRCILNRIKANVAHTKIELFVGGELIDPADDRKLIGQLNLKDKSLITAKLTQISSNMPSSPDSSSDSSTGSPGNHGNHYSDGPNPEVESCLPGVIMSLHPRYISFLWQVADLGSSLNMPPLRDGARVLMKLMPPDSTTIEKLRAICLDHAKLGESSLSPSLDSLFFGPSASQVLYLTEVVYALLMPAGAPLADDSSDFQFHFLKSGGLPLVLSMLTRNNFLPNADMETRRGAYLNALKIAKLLLTAIGYGHVRAVAEACQPGVEGVNPMTQINQVTHDQAVVLQSALQSIPNPSSECMLRNVSVRLAQQISDEASRYMPDICVIRAIQKIIWASGCGSLQLVFSPNEEITKIYEKTNAGNEPDLEDEQVCCEALEVMTLCFALIPTALDALSKEKAWQTFIIDLLLHCHSKTVRQVAQEQFFLMCTRCCMGHRPLLFFITLLFTVLGSTARERAKHSGDYFTLLRHLLNYAYNSNINVPNAEVLLNNEIDWLKRIRDDVKRTGETGIEETILEGHLGVTKELLAFQTSEKKFHIGCEKGGANLIKELIDDFIFPASNVYLQYMRNGELPAEQAIPVCGSPPTINAGFELLVALAVGCVRNLKQIVDSLTEMYYIGTAITTCEALTEWEYLPPVGPRPPKGFVGLKNAGATCYMNSVIQQLYMIPSIRNGILAIEGTGSDVDDDMSGDEKQDNESNVDPRDDVFGYPQQFEDKPALSKTEDRKEYNIGVLRHLQVIFGHLAASRLQYYVPRGFWKQFRLWGEPVNLREQHDALEFFNSLVDSLDEALKALGHPAMLSKVLGGSFADQKICQGCPHRYECEESFTTLNVDIRNHQNLLDSLEQYVKGDLLEGANAYHCEKCNKKVDTVKRLLIKKLPPVLAIQLKRFDYDWERECAIKFNDYFEFPRELDMEPYTVAGVAKLEGDNVNPESQLIQQSEQSESETAGSTKYRLVGVLVHSGQASGGHYYSYIIQRNGGDGERNRWYKFDDGDVTECKMDDDEEMKNQCFGGEYMGEVFDHMMKRMSYRRQKRWWNAYILFYERMDTIDQDDELIRYISELAITTRPHQIIMPSAIERSVRKQNVQFMHNRMQYSMEYFQFMKKLLTCNGVYLNPPPGQDHLLPEAEEITMISIQLAARFLFTTGFHTKKVVRGSASDWYDALCILLRHSKNVRFWFAHNVLFNVSNRFSEYLLECPSAEVRGAFAKLIVFIAHFSLQDGPCPSPFASPGPSSQAYDNLSLSDHLLRAVLNLLRREVSEHGRHLQQYFNLFVMYANLGVAEKTQLLKLSVPATFMLVSLDEGPGPPIKYQYAELGKLYSVVSQLIRCCNVSSRMQSSINGNPPLPNPFGDPNLSQPIMPIQQNVADILFVRTSYVKKIIEDCSNSEETVKLLRFCCWENPQFSSTVLSELLWQVAYSYTYELRPYLDLLLQILLIEDSWQTHRIHNALKGIPDDRDGLFDTIQRSKNHYQKRAYQCIKCMVALFSNCPVAYQILQGNGDLKRKWTWAVEWLGDELERRPYTGNPQYTYNNWSPPVQSNETSNGYFLERSHSARMTLAKACELCPEEEPDDQDAPDEHESPPPEDAPLYPHSPGSQYQQNNHVHGQPYTGPAAHHMNNPQRTGQRAQENYEGSEEVSPPQTKDQ

SEQ ID NO: 239 - protein, 509 aa, Artificial Sequence
  Description of Artificial Sequence: Synthetic polypeptide
MGCGCSSHPEDDWMENIDVCENCHYPIVPLDGKGTLLIRNGSEVRDPLVTYEGSNPPASPLQDNLVIALHSYEPSHDGDLGFEKGEQLRILEQSGEWWKAQSLTTGQEGFIPFNFVAKANSLEPEPWFFKNLSRKDAERQLLAPGNTHGSFLIRESESTAGSFSLSVRDFDQNQGEVVKHYKIRNLDNGGFYISPRITFPGLHELVRHYTNASDGLCTRLSRPCQTQKPQKPWWEDEWEVPRETLKLVERLGAGQFGEVWMGYYNGHTKVAVKSLKQGSMSPDAFLAEANLMKQLQHQRLVRLYAVVTQEPIYIITEYMENGSLVDFLKTPSGIKLTINKLLDMAAQIAEGMAFIEERNYIHRDLRAANILVSDTLSCKIADFGLARLIEDNEYTAREGAKFPIKWTAPEAINYGTFTIKSDVWSFGILLTEIVTHGRIPYPGMTNPEVIQNLERGYRMVRPDNCPEELYQLMRLCWKERPEDRPTFDYLRSVLEDFFTATEGQYQPQP

SEQ ID NO: 240 - protein, 543 aa, Artificial Sequence
  Description of Artificial Sequence: Synthetic polypeptide
MGCIKSKENKSPAIKYRPENTPEPVSTSVSHYGAEPTTVSPCPSSSAKGTAVNFSSLSMTPFGGSSGVTPFGGASSSFSVVPSSYPAGLTGGVTIFVALYDYEARTTEDLSFKKGERFQIINNTEGDWWEARSIATGKNGYIPSNYVAPADSIQAEEWYFGKMGRKDAERLLLNPGNQRGIFLVRESETTKGAYSLSIRDWDEIRGDNVKHYKIRKLDNGGYYITTRAQFDTLQKLVKHYTEHADGLCHKLTTVCPTVKPQTQGLAKDAWEIPRESLRLEVKLGQGCFGEVWMGTWNGTTKVAIKTLKPGTMMPEAFLQEAQIMKKLRHDKLVPLYAVVSEEPIYIVTEFMSKGSLLDFLKEGDGKYLKLPQLVDMAAQIADGMAYIERMNYIHRDLRAANILVGENLVCKIADFGLARLIEDNEYTARQGAKFPIKWTAPEAALYGRFTIKSDVWSFGILQTELVTKGRVPYPGMVNREVLEQVERGYRMPCPQGCPESLHELMNLCWKKDPDERPTFEYIQSFLEDYFTATEPQYQPGENL

SEQ ID NO: 241 - protein, 403 aa, Artificial Sequence [sequence omitted]

SEQ ID NO: 242 - protein, 238 aa, Artificial Sequence
  Description of Artificial Sequence: Synthetic polypeptide
VSKGEELFTGVVPILVELDGDVNGHKFSVSGEGEGDATYGKLTLKFICTTGKLPVPWPTLVTTFGYGLQCFARYPDHMKQHDFFKSAMPEGYVQERTIFFKDDGNYKTRAEVKFEGDTLVNRIELKGIDFKEDGNILGHKLEYNYNSHNVYIMADKQKNGIKVNFKIRHNIEDGSVQLADHYQQNTPIGDGPVLLPDNHYLSYQSALSKDPNEKRDHMVLLEFVTAAGITLGMDELYK

SEQ ID NO: 243 - protein, 236 aa, Artificial Sequence
  Description of Artificial Sequence: Synthetic polypeptide
MVSKGEEDNMAIIKEFMRFKVHMEGSVNGHEFEIEGEGEGRPYEGTQTAKLKVTKGGPLPFAWDILSPQFMYGSKAYVKHPADIPDYLKLSFPEGFKWERVMNFEDGGVVTVTQDSSLQDGEFIYKVKLRGTNFPSDGPVMQKKTMGWEASSERMYPEDGALKGEIKQRLKLKDGGHYDAEVKTTYKAKKPVQLPGAYNVNIKLDITSHNEDYTIVEQYERAEGRHSTGGMDELYK

SEQ ID NO: 244 - protein, 239 aa, Artificial Sequence
  Description of Artificial Sequence: Synthetic polypeptide
MVSKGEELFTGVVPILVELDGDVNGHKFSVSGEGEGDATYGKLTLKFICTTGKLPVPWPTLVTTLTWGVQCFSRYPDHMKQHDFFKSAMPEGYVQERTIFFKDDGNYKTRAEVKFEGDTLVNRIELKGIDFKEDGNILGHKLEYNYISHNVYITADKQKNGIKANFKIRHNIEDGSVQLADHYQQNTPIGDGPVLLPDNHYLSTQSALSKDPNEKRDHMVLLEFVTAAGITLGMDELYK

SEQ ID NO: 245 - protein, 22 aa, Artificial Sequence
  Description of Artificial Sequence: Synthetic peptide
GSGATNFSLLKQAGDVEENPGP

SEQ ID NO: 246 - protein, 21 aa, Artificial Sequence
  Description of Artificial Sequence: Synthetic peptide
GSGEGRGSLLTCGDVEENPGP

SEQ ID NO: 247 - protein, 23 aa, Artificial Sequence
  Description of Artificial Sequence: Synthetic peptide
GSGQCTNYALLKLAGDVESNPGP

SEQ ID NO: 248 - protein, 115 aa, Artificial Sequence [sequence omitted]

SEQ ID NO: 249 - protein, 95 aa, Artificial Sequence
  Description of Artificial Sequence: Synthetic polypeptide
GSVSSVPTKLEVVAATPTSLLISWDAPAVTVDFYHITYGETGGNSPVQEFTVPGSKSTATISGLKPGVDYTITVYAYVSYPEYYFPSPISINYRT

SEQ ID NO: 250 - protein, 98 aa, Artificial Sequence
  Description of Artificial Sequence: Synthetic polypeptide
GSVSSVPTKLEVVAATPTSLLISWDAPAVTVDYYFITYGETGGNSPVQEFTVPGSKSTATISGLKPGVDYTITVYAWYYYDDEYYMNESSPISINYRT

SEQ ID NO: 251 - protein, 93 aa, Artificial Sequence
  Description of Artificial Sequence: Synthetic polypeptide
GSVSSVPTKLEVVAATPTSLLISWDAPAVTVVHYVITYGETGGNSPVQEFTVPGSKSTATISGLKPGVDYTITVYAIDFYWGSYSPISINYRT

SEQ ID NO: 252 - protein, 394 aa, Artificial Sequence
  Description of Artificial Sequence: Synthetic polypeptide
PPSFSEGSGGSRTPEKGFSDREPTRPPRPILQRQDDIVQEKRLSRGISHASSSIVSLARSHVSSNGGGGGSNEHPLEMPICAFQLPDLTVYNEDFRSFIERDLIEQSMLVALEQAGRLNWWVSVDPTSQRLLPLATTGDGNCLLHAASLGMWGFHDRDLMLRKALYALMEKGVEKEALKRRWRWQQTQQNKESGLVYTEDEWQKEWNELIKLASSEPRMHLGTNGANCGGVESSEEPVYESLEEFHVFVLAHVLRRPIVVVADTMLRDSGGEAFAPIPFGGIYLPLEVPASQCHRSPLVLAYDQAHFSALVSMEQKENTKEQAVIPLTDSEYKLLPLHFAVDPGKGWEWGKDDSDNVRLASVILSLEVKLHLLHSYMNVKWIPLSSDAQAPLAQ

SEQ ID NO: 253 - protein, 195 aa, Artificial Sequence
  Description of Artificial Sequence: Synthetic polypeptide
DEKLALYLAEVEKQDKYLRQRNKYRFHIIPDGNCLYRAVSKTVYGDQSLHRELREQTVHYIADHLDHFSPLIEGDVGEFIIAAAQDGAWAGYPELLAMGQMLNVNIHLTTGGRLESPTVSTMIHYLGPEDSLRPSIWLSWLSNGHYDAVFDHSYPNPEYDNWCKQTQVQRKRDEELAKSMAISLSKMYIEQNACS

SEQ ID NO: 254 - protein, 453 aa, Artificial Sequence
  Description of Artificial Sequence: Synthetic polypeptide
LEVDFKKLKQIKNRMKKTDWLFLNACVGVVEGDLAAIEAYKSSGGDIARQLTADEVRLLNRPSAFDVGYTLVHLAIRFQRQDMLAILLTEVSQQAAKCIPAMVCPELTEQIRREIAASLHQRKGDFACYFLTDLVTFTLPADIEDLPPTVQEKLFDEVLDRDVQKELEEESPIINWSLELATRLDSRLYALWNRTAGDCLLDSVLQATWGIYDKDSVLRKALHDSLHDCSHWFYTRWKDWESWYSQSFGLHFSLREEQWQEDWAFILSLASQPGASLEQTHIFVLAHILRRPIIVYGVKYYKSFRGETLGYTRFQGVYLPLLWEQSFCWKSPIALGYTRGHFSALVAMENDGYGNRGAGANLNTDDDVTITFLPLVDSERKLLHVHFLSAQELGNEEQQEKLLREWLDCCVTEGGVLVAMQKSSRRRNHPLVTQMVEKWLDRYRQIRPCTSLS

SEQ ID NO: 255 - protein, 370 aa, Artificial Sequence
  Description of Artificial Sequence: Synthetic polypeptide
SDDKMAHHTLLLGSGHVGLRNLGNTCFLNAVLQCLSSTRPLRDFCLRRDFRQEVPGGGRAQELTEAFADVIGALWHPDSCEAVNPTRFRAVFQKYVPSFSGYSQQDAQEFLKLLMERLHLEINRRGRRAPPILANGPVPSPPRRGGALLEEPELSDDDRANLMWKRYLEREDSKIVDLFVGQLKSCLKCQACGYRSTTFEVFCDLSLPIPKKGFAGGKVSLRDCFNLFTKEEELESENAPVCDRCRQKTRSTKKLTVQRFPRILVLHLNRFSASRGSIKKSSVGVDFPLQRLSLGDFASDKAGSPVYQLYALCNHSGSVHYGHYTALCRCQTGWHVYNDSRVSPVSENQVASSEGYVLFYQLMQEPPRCL

SEQ ID NO: 256 - protein, 175 aa, Artificial Sequence
  Description of Artificial Sequence: Synthetic polypeptide
ATPMDAYLRKLGLYRKLVAKDGSCLFRAVAEQVLHSQSRHVEVRMACIHYLRENREKFEAFIEGSFEEYLKRLENPQEWVGQVEISALSLMYRKDFIIYREPNVSPSQVTENNFPEKVLLCFSNGNHYDIVYPIKYKESSAMCQSLLYELLYEKVFKTDVSKIVMELDTLEVADE

SEQ ID NO: 257 - protein, 520 aa, Artificial Sequence; identical to SEQ ID NO: 3
  Description of Artificial Sequence: Synthetic polypeptide

SEQ ID NO: 258 - protein, 1005 aa, Artificial Sequence
  Description of Artificial Sequence: Synthetic polypeptide
MGCGCSSHPEDDWMENIDVCENCHYPIVPLDGKGTLLIRNGSEVRDPLVTYEGSNPPASPLQDNLVIALHSYEPSHDGDLGFEKGEQLRILEQSGEWWKAQSLTTGQEGFIPFNFVAKANSLEPEPWFFKNLSRKDAERQLLAPGNTHGSFLIRESESTAGSFSLSVRDFDQNQGEVVKHYKIRNLDNGGFYISPRITFPGLHELVRHYTNASDGLCTRLSRPCQTQKPQKPWWEDEWEVPRETLKLVERLGAGQFGEVWMGYYNGHTKVAVKSLKQGSMSPDAFLAEANLMKQLQHQRLVRLYAVVTQEPIYIITEYMENGSLVDFLKTPSGIKLTINKLLDMAAQIAEGMAFIEERNYIHRDLRAANILVSDTLSCKIADFGLARLIEDNEYTAREGAKFPIKWTAPEAINYGTFTIKSDVWSFGILLTEIVTHGRIPYPGMTNPEVIQNLERGYRMVRPDNCPEELYQLMRLCWKERPEDRPTFDYLRSVLEDFFTATEGQYQPQPVSKGEELFTGVVPILVELDGDVNGHKFSVSGEGEGDATYGKLTLKFICTTGKLPVPWPTLVTTFGYGLQCFARYPDHMKQHDFFKSAMPEGYVQERTIFFKDDGNYKTRAEVKFEGDTLVNRIELKGIDFKEDGNILGHKLEYNYNSHNVYIMADKQKNGIKVNFKIRHNIEDGSVQLADHYQQNTPIGDGPVLLPDNHYLSYQSALSKDPNEKRDHMVLLEFVTAAGITLGMDELYKGSGATNFSLLKQAGDVEENPGPMVSKGEEDNMAIIKEFMRFKVHMEGSVNGHEFEIEGEGEGRPYEGTQTAKLKVTKGGPLPFAWDILSPQFMYGSKAYVKHPADIPDYLKLSFPEGFKWERVMNFEDGGVVTVTQDSSLQDGEFIYKVKLRGTNFPSDGPVMQKKTMGWEASSERMYPEDGALKGEIKQRLKLKDGGHYDAEVKTTYKAKKPVQLPGAYNVNIKLDITSHNEDYTIVEQYERAEGRHSTGGMDELYK

SEQ ID NO: 259 - protein, 1039 aa, Artificial Sequence
  Description of Artificial Sequence: Synthetic polypeptide
MGCIKSKENKSPAIKYRPENTPEPVSTSVSHYGAEPTTVSPCPSSSAKGTAVNFSSLSMTPFGGSSGVTPFGGASSSFSVVPSSYPAGLTGGVTIFVALYDYEARTTEDLSFKKGERFQIINNTEGDWWEARSIATGKNGYIPSNYVAPADSIQAEEWYFGKMGRKDAERLLLNPGNQRGIFLVRESETTKGAYSLSIRDWDEIRGDNVKHYKIRKLDNGGYYITTRAQFDTLQKLVKHYTEHADGLCHKLTTVCPTVKPQTQGLAKDAWEIPRESLRLEVKLGQGCFGEVWMGTWNGTTKVAIKTLKPGTMMPEAFLQEAQIMKKLRHDKLVPLYAVVSEEPIYIVTEFMSKGSLLDFLKEGDGKYLKLPQLVDMAAQIADGMAYIERMNYIHRDLRAANILVGENLVCKIADFGLARLIEDNEYTARQGAKFPIKWTAPEAALYGRFTIKSDVWSFGILQTELVTKGRVPYPGMVNREVLEQVERGYRMPCPQGCPESLHELMNLCWKKDPDERPTFEYIQSFLEDYFTATEPQYQPGENLVSKGEELFTGVVPILVELDGDVNGHKFSVSGEGEGDATYGKLTLKFICTTGKLPVPWPTLVTTFGYGLQCFARYPDHMKQHDFFKSAMPEGYVQERTIFFKDDGNYKTRAEVKFEGDTLVNRIELKGIDFKEDGNILGHKLEYNYNSHNVYIMADKQKNGIKVNFKIRHNIEDGSVQLADHYQQNTPIGDGPVLLPDNHYLSYQSALSKDPNEKRDHMVLLEFVTAAGITLGMDELYKGSGATNFSLLKQAGDVEENPGPMVSKGEEDNMAIIKEFMRFKVHMEGSVNGHEFEIEGEGEGRPYEGTQTAKLKVTKGGPLPFAWDILSPQFMYGSKAYVKHPADIPDYLKLSFPEGFKWERVMNFEDGGVVTVTQDSSLQDGEFIYKVKLRGTNFPSDGPVMQKKTMGWEASSERMYPEDGALKGEIKQRLKLKDGGHYDAEVKTTYKAKKPVQLPGAYNVNIKLDITSHNEDYTIVEQYERAEGRHSTGGMDELYK

SEQ ID NO: 260 - protein, 899 aa, Artificial Sequence
  Description of Artificial Sequence: Synthetic polypeptide
MDRSKENCISGPVKATAPVGGPKRVLVTQQFPCQNPLPVNSGQAQRVLCPSNSSQRVPLQAQKLVSSHKPVQNQKQKQLQATSVPHPVSRPLNNTQKSKQPLPSAPENNPEEELASKQKNEESKKRQWALEDFEIGRPLGKGKFGNVYLAREKQSKFILALKVLFKAQLEKAGVEHQLRREVEIQSHLRHPNILRLYGYFHDATRVYLILEYAPLGTVYRELQKLSKFDEQRTATYITELANALSYCHSKRVIHRDIKPENLLLGSAGELKIADFGWSVHAPSSRRTTLCGTLDYLPPEMIEGRMHDEKVDLWSLGVLCYEFLVGKPPFEANTYQETYKRISRVEFTFPDFVTEGARDLISRLLKHNPSQRPMLREVLEHPWITANSSKPSNCQNKESASKQSVSKGEELFTGVVPILVELDGDVNGHKFSVSGEGEGDATYGKLTLKFICTTGKLPVPWPTLVTTFGYGLQCFARYPDHMKQHDFFKSAMPEGYVQERTIFFKDDGNYKTRAEVKFEGDTLVNRIELKGIDFKEDGNILGHKLEYNYNSHNVYIMADKQKNGIKVNFKIRHNIEDGSVQLADHYQQNTPIGDGPVLLPDNHYLSYQSALSKDPNEKRDHMVLLEFVTAAGITLGMDELYKGSGATNFSLLKQAGDVEENPGPMVSKGEEDNMAIIKEFMRFKVHMEGSVNGHEFEIEGEGEGRPYEGTQTAKLKVTKGGPLPFAWDILSPQFMYGSKAYVKHPADIPDYLKLSFPEGFKWERVMNFEDGGVVTVTQDSSLQDGEFIYKVKLRGTNFPSDGPVMQKKTMGWEASSERMYPEDGALKGEIKQRLKLKDGGHYDAEVKTTYKAKKPVQLPGAYNVNIKLDITSHNEDYTIVEQYERAEGRHSTGGMDELYK

SEQ ID NO: 261 - protein, 655 aa, Artificial Sequence
  Description of Artificial Sequence: Synthetic polypeptide
MVSKGEELFTGVVPILVELDGDVNGHKFSVSGEGEGDATYGKLTLKFICTTGKLPVPWPTLVTTLTWGVQCFSRYPDHMKQHDFFKSAMPEGYVQERTIFFKDDGNYKTRAEVKFEGDTLVNRIELKGIDFKEDGNILGHKLEYNYISHNVYITADKQKNGIKANFKIRHNIEDGSVQLADHYQQNTPIGDGPVLLPDNHYLSTQSALSKDPNEKRDHMVLLEFVTAAGITLGMDELYKGSGATNFSLLKQAGDVEENPGPPPSFSEGSGGSRTPEKGFSDREPTRPPRPILQRQDDIVQEKRLSRGISHASSSIVSLARSHVSSNGGGGGSNEHPLEMPICAFQLPDLTVYNEDFRSFIERDLIEQSMLVALEQAGRLNWWVSVDPTSQRLLPLATTGDGNCLLHAASLGMWGFHDRDLMLRKALYALMEKGVEKEALKRRWRWQQTQQNKESGLVYTEDEWQKEWNELIKLASSEPRMHLGTNGANCGGVESSEEPVYESLEEFHVFVLAHVLRRPIVVVADTMLRDSGGEAFAPIPFGGIYLPLEVPASQCHRSPLVLAYDQAHFSALVSMEQKENTKEQAVIPLTDSEYKLLPLHFAVDPGKGWEWGKDDSDNVRLASVILSLEVKLHLLHSYMNVKWIPLSSDAQAPLAQ

SEQ ID NO: 262 - protein, 456 aa, Artificial Sequence
  Description of Artificial Sequence: Synthetic polypeptide
MVSKGEELFTGVVPILVELDGDVNGHKFSVSGEGEGDATYGKLTLKFICTTGKLPVPWPTLVTTLTWGVQCFSRYPDHMKQHDFFKSAMPEGYVQERTIFFKDDGNYKTRAEVKFEGDTLVNRIELKGIDFKEDGNILGHKLEYNYISHNVYITADKQKNGIKANFKIRHNIEDGSVQLADHYQQNTPIGDGPVLLPDNHYLSTQSALSKDPNEKRDHMVLLEFVTAAGITLGMDELYKGSGATNFSLLKQAGDVEENPGPDEKLALYLAEVEKQDKYLRQRNKYRFHIIPDGNCLYRAVSKTVYGDQSLHRELREQTVHYIADHLDHFSPLIEGDVGEFIIAAAQDGAWAGYPELLAMGQMLNVNIHLTTGGRLESPTVSTMIHYLGPEDSLRPSIWLSWLSNGHYDAVFDHSYPNPEYDNWCKQTQVQRKRDEELAKSMAISLSKMYIEQNACS

SEQ ID NO: 263 - protein, 714 aa, Artificial Sequence
  Description of Artificial Sequence: Synthetic polypeptide
MVSKGEELFTGVVPILVELDGDVNGHKFSVSGEGEGDATYGKLTLKFICTTGKLPVPWPTLVTTLTWGVQCFSRYPDHMKQHDFFKSAMPEGYVQERTIFFKDDGNYKTRAEVKFEGDTLVNRIELKGIDFKEDGNILGHKLEYNYISHNVYITADKQKNGIKANFKIRHNIEDGSVQLADHYQQNTPIGDGPVLLPDNHYLSTQSALSKDPNEKRDHMVLLEFVTAAGITLGMDELYKGSGATNFSLLKQAGDVEENPGPLEVDFKKLKQIKNRMKKTDWLFLNACVGVVEGDLAAIEAYKSSGGDIARQLTADEVRLLNRPSAFDVGYTLVHLAIRFQRQDMLAILLTEVSQQAAKCIPAMVCPELTEQIRREIAASLHQRKGDFACYFLTDLVTFTLPADIEDLPPTVQEKLFDEVLDRDVQKELEEESPIINWSLELATRLDSRLYALWNRTAGDCLLDSVLQATWGIYDKDSVLRKALHDSLHDCSHWFYTRWKDWESWYSQSFGLHFSLREEQWQEDWAFILSLASQPGASLEQTHIFVLAHILRRPIIVYGVKYYKSFRGETLGYTRFQGVYLPLLWEQSFCWKSPIALGYTRGHFSALVAMENDGYGNRGAGANLNTDDDVTITFLPLVDSERKLLHVHFLSAQELGNEEQQEKLLREWLDCCVTEGGVLVAMQKSSRRRNHPLVTQMVEKWLDRYRQIRPCTSLS

SEQ ID NO: 264 - protein, 631 aa, Artificial Sequence
  Description of Artificial Sequence: Synthetic polypeptide
MVSKGEELFTGVVPILVELDGDVNGHKFSVSGEGEGDATYGKLTLKFICTTGKLPVPWPTLVTTLTWGVQCFSRYPDHMKQHDFFKSAMPEGYVQERTIFFKDDGNYKTRAEVKFEGDTLVNRIELKGIDFKEDGNILGHKLEYNYISHNVYITADKQKNGIKANFKIRHNIEDGSVQLADHYQQNTPIGDGPVLLPDNHYLSTQSALSKDPNEKRDHMVLLEFVTAAGITLGMDELYKGSGATNFSLLKQAGDVEENPGPSDDKMAHHTLLLGSGHVGLRNLGNTCFLNAVLQCLSSTRPLRDFCLRRDFRQEVPGGGRAQELTEAFADVIGALWHPDSCEAVNPTRFRAVFQKYVPSFSGYSQQDAQEFLKLLMERLHLEINRRGRRAPPILANGPVPSPPRRGGALLEEPELSDDDRANLMWKRYLEREDSKIVDLFVGQLKSCLKCQACGYRSTTFEVFCDLSLPIPKKGFAGGKVSLRDCFNLFTKEEELESENAPVCDRCRQKTRSTKKLTVQRFPRILVLHLNRFSASRGSIKKSSVGVDFPLQRLSLGDFASDKAGSPVYQLYALCNHSGSVHYGHYTALCRCQTGWHVYNDSRVSPVSENQVASSEGYVLFYQLMQEPPRCL

SEQ ID NO: 265 - protein, 436 aa, Artificial Sequence
  Description of Artificial Sequence: Synthetic polypeptide
MVSKGEELFTGVVPILVELDGDVNGHKFSVSGEGEGDATYGKLTLKFICTTGKLPVPWPTLVTTLTWGVQCFSRYPDHMKQHDFFKSAMPEGYVQERTIFFKDDGNYKTRAEVKFEGDTLVNRIELKGIDFKEDGNILGHKLEYNYISHNVYITADKQKNGIKANFKIRHNIEDGSVQLADHYQQNTPIGDGPVLLPDNHYLSTQSALSKDPNEKRDHMVLLEFVTAAGITLGMDELYKGSGATNFSLLKQAGDVEENPGPATPMDAYLRKLGLYRKLVAKDGSCLFRAVAEQVLHSQSRHVEVRMACIHYLRENREKFEAFIEGSFEEYLKRLENPQEWVGQVEISALSLMYRKDFIIYREPNVSPSQVTENNFPEKVLLCFSNGNHYDIVYPIKYKESSAMCQSLLYELLYEKVFKTDVSKIVMELDTLEVADE

SEQ ID NO: 266 - protein, 770 aa, Artificial Sequence
  Description of Artificial Sequence: Synthetic polypeptide
MVSKGEELFTGVVPILVELDGDVNGHKFSVSGEGEGDATYGKLTLKFICTTGKLPVPWPTLVTTLTWGVQCFSRYPDHMKQHDFFKSAMPEGYVQERTIFFKDDGNYKTRAEVKFEGDTLVNRIELKGIDFKEDGNILGHKLEYNYISHNVYITADKQKNGIKANFKIRHNIEDGSVQLADHYQQNTPIGDGPVLLPDNHYLSTQSALSKDPNEKRDHMVLLEFVTAAGITLGMDELYKGSGATNFSLLKQAGDVEENPGPQVQLVESGGALVQPGGSLRLSCAASGFPVNRYSMRWYRQAPGKEREWVAGMSSAGDRSSYEDSVKGRFTISRDDARNTVYLQMNSLKPEDTAVYYCNVNVGFEYWGQGTQVTVSSPPSFSEGSGGSRTPEKGFSDREPTRPPRPILQRQDDIVQEKRLSRGISHASSSIVSLARSHVSSNGGGGGSNEHPLEMPICAFQLPDLTVYNEDFRSFIERDLIEQSMLVALEQAGRLNWWVSVDPTSQRLLPLATTGDGNCLLHAASLGMWGFHDRDLMLRKALYALMEKGVEKEALKRRWRWQQTQQNKESGLVYTEDEWQKEWNELIKLASSEPRMHLGTNGANCGGVESSEEPVYESLEEFHVFVLAHVLRRPIVVVADTMLRDSGGEAFAPIPFGGIYLPLEVPASQCHRSPLVLAYDQAHFSALVSMEQKENTKEQAVIPLTDSEYKLLPLHFAVDPGKGWEWGKDDSDNVRLASVILSLEVKLHLLHSYMNVKWIPLSSDAQAPLAQ

SEQ ID NO: 267 - protein, 571 aa, Artificial Sequence
  Description of Artificial Sequence: Synthetic polypeptide
MVSKGEELFTGVVPILVELDGDVNGHKFSVSGEGEGDATYGKLTLKFICTTGKLPVPWPTLVTTLTWGVQCFSRYPDHMKQHDFFKSAMPEGYVQERTIFFKDDGNYKTRAEVKFEGDTLVNRIELKGIDFKEDGNILGHKLEYNYISHNVYITADKQKNGIKANFKIRHNIEDGSVQLADHYQQNTPIGDGPVLLPDNHYLSTQSALSKDPNEKRDHMVLLEFVTAAGITLGMDELYKGSGATNFSLLKQAGDVEENPGPQVQLVESGGALVQPGGSLRLSCAASGFPVNRYSMRWYRQAPGKEREWVAGMSSAGDRSSYEDSVKGRFTISRDDARNTVYLQMNSLKPEDTAVYYCNVNVGFEYWGQGTQVTVSSDEKLALYLAEVEKQDKYLRQRNKYRFHIIPDGNCLYRAVSKTVYGDQSLHRELREQTVHYIADHLDHFSPLIEGDVGEFIIAAAQDGAWAGYPELLAMGQMLNVNIHLTTGGRLESPTVSTMIHYLGPEDSLRPSIWLSWLSNGHYDAVFDHSYPNPEYDNWCKQTQVQRKRDEELAKSMAISLSKMYIEQNACS

SEQ ID NO: 268 - protein, 828 aa, Artificial Sequence
  Description of Artificial Sequence: Synthetic polypeptide
MVSKGEELFTGVVPILVELDGDVNGHKFSVSGEGEGDATYGKLTLKFICTTGKLPVPWPTLVTTLTWGVQCFSRYPDHMKQHDFFKSAMPEGYVQERTIFFKDDGNYKTRAEVKFEGDTLVNRIELKGIDFKEDGNILGHKLEYNYISHNVYITADKQKNGIKANFKIRHNIEDGSVQLADHYQQNTPIGDGPVLLPDNHYLSTQSALSKDPNEKRDHMVLLEFVTAAGITLGMDELYKGSGATNFSLLKQAGDVEENPGPQVQLVESGGALVQPGGSLRLSCAASGFPVNRYSMRWYRQAPGKEREWVAGMSSAGDRSSYEDSVKGRFTISRDDARNTVYLQMNSLKPEDTAVYYCNVNVGFEYWGQGTQVTVSSLEVDFKKLKQIKNRMKKTDWLFLNACVGVVEGDLAAIEAYKSSGGDIARQLTADEVRLLNRPSAFDVGYTLVHLAIRFQRQDMLAILLTEVSQQAAKCIPAMVCPELTEQIRREIAASLHQRKGDFACYFLTDLVTFTLPADIEDLPPTVQEKLFDEVLDRDVQKELEEESPIINWSLELATRLDSRLYALWNRTAGDCLLDSVLQATWGIYDKDSVLRKALHDSLHDCSHWFYTRWKDWESWYSQSFGLHFSLREEQWQEDWAFILSLASQPGASLEQTHIFVLAHILRRPIIVYGVKYYKSFRGETLGYTRFQGVYLPLLWEQSFCWKSPIALGYTRGHFSALVAMENDGYGNRGAGANLNTDDDVTITFLPLVDSERKLLHVHFLSAQELGNEEQQEKLLREWLDCCVTEGGVLVAMQKSSRRRNHPLVTQMVEKWLDRYRQIRPCTSL

SEQ ID NO: 269 - protein, 746 aa, Artificial Sequence
  Description of Artificial Sequence: Synthetic polypeptide
MVSKGEELFTGVVPILVELDGDVNGHKFSVSGEGEGDATYGKLTLKFICTTGKLPVPWPTLVTTLTWGVQCFSRYPDHMKQHDFFKSAMPEGYVQERTIFFKDDGNYKTRAEVKFEGDTLVNRIELKGIDFKEDGNILGHKLEYNYISHNVYITADKQKNGIKANFKIRHNIEDGSVQLADHYQQNTPIGDGPVLLPDNHYLSTQSALSKDPNEKRDHMVLLEFVTAAGITLGMDELYKGSGATNFSLLKQAGDVEENPGPQVQLVESGGALVQPGGSLRLSCAASGFPVNRYSMRWYRQAPGKEREWVAGMSSAGDRSSYEDSVKGRFTISRDDARNTVYLQMNSLKPEDTAVYYCNVNVGFEYWGQGTQVTVSSSDDKMAHHTLLLGSGHVGLRNLGNTCFLNAVLQCLSSTRPLRDFCLRRDFRQEVPGGGRAQELTEAFADVIGALWHPDSCEAVNPTRFRAVFQKYVPSFSGYSQQDAQEFLKLLMERLHLEINRRGRRAPPILANGPVPSPPRRGGALLEEPELSDDDRANLMWKRYLEREDSKIVDLFVGQLKSCLKCQACGYRSTTFEVFCDLSLPIPKKGFAGGKVSLRDCFNLFTKEEELESENAPVCDRCRQKTRSTKKLTVQRFPRILVLHLNRFSASRGSIKKSSVGVDFPLQRLSLGDFASDKAGSPVYQLYALCNHSGSVHYGHYTALCRCQTGWHVYNDSRVSPVSENQVASSEGYVLFYQLMQEPPRCL

SEQ ID NO: 270 - protein, 551 aa, Artificial Sequence
  Description of Artificial Sequence: Synthetic polypeptide
MVSKGEELFTGVVPILVELDGDVNGHKFSVSGEGEGDATYGKLTLKFICTTGKLPVPWPTLVTTLTWGVQCFSRYPDHMKQHDFFKSAMPEGYVQERTIFFKDDGNYKTRAEVKFEGDTLVNRIELKGIDFKEDGNILGHKLEYNYISHNVYITADKQKNGIKANFKIRHNIEDGSVQLADHYQQNTPIGDGPVLLPDNHYLSTQSALSKDPNEKRDHMVLLEFVTAAGITLGMDELYKGSGATNFSLLKQAGDVEENPGPQVQLVESGGALVQPGGSLRLSCAASGFPVNRYSMRWYRQAPGKEREWVAGMSSAGDRSSYEDSVKGRFTISRDDARNTVYLQMNSLKPEDTAVYYCNVNVGFEYWGQGTQVTVSSATPMDAYLRKLGLYRKLVAKDGSCLFRAVAEQVLHSQSRHVEVRMACIHYLRENREKFEAFIEGSFEEYLKRLENPQEWVGQVEISALSLMYRKDFIIYREPNVSPSQVTENNFPEKVLLCFSNGNHYDIVYPIKYKESSAMCQSLLYELLYEKVFKTDVSKIVMELDTLEVADE

SEQ ID NO: 271 - protein, 750 aa, Artificial Sequence
  Description of Artificial Sequence: Synthetic polypeptide
MVSKGEELFTGVVPILVELDGDVNGHKFSVSGEGEGDATYGKLTLKFICTTGKLPVPWPTLVTTLTWGVQCFSRYPDHMKQHDFFKSAMPEGYVQERTIFFKDDGNYKTRAEVKFEGDTLVNRIELKGIDFKEDGNILGHKLEYNYISHNVYITADKQKNGIKANFKIRHNIEDGSVQLADHYQQNTPIGDGPVLLPDNHYLSTQSALSKDPNEKRDHMVLLEFVTAAGITLGMDELYKGSGATNFSLLKQAGDVEENPGPGSVSSVPTKLEVVAATPTSLLISWDAPAVTVLYYLITYGETGDHWSGHQAFEVPGSKSTATISGLKPGVDYTITVYAHAESYGESYSPISINYRTPPSFSEGSGGSRTPEKGFSDREPTRPPRPILQRQDDIVQEKRLSRGISHASSSIVSLARSHVSSNGGGGGSNEHPLEMPICAFQLPDLTVYNEDFRSFIERDLIEQSMLVALEQAGRLNWWVSVDPTSQRLLPLATTGDGNCLLHAASLGMWGFHDRDLMLRKALYALMEKGVEKEALKRRWRWQQTQQNKESGLVYTEDEWQKEWNELIKLASSEPRMHLGTNGANCGGVESSEEPVYESLEEFHVFVLAHVLRRPIVVVADTMLRDSGGEAFAPIPFGGIYLPLEVPASQCHRSPLVLAYDQAHFSALVSMEQKENTKEQAVIPLTDSEYKLLPLHFAVDPGKGWEWGKDDSDNVRLASVILSLEVKLHLLHSYMNVKWIPLSSDAQAPLAQ

SEQ ID NO: 272 - protein, 551 aa, Artificial Sequence
  Description of Artificial Sequence: Synthetic polypeptide
MVSKGEELFTGVVPILVELDGDVNGHKFSVSGEGEGDATYGKLTLKFICTTGKLPVPWPTLVTTLTWGVQCFSRYPDHMKQHDFFKSAMPEGYVQERTIFFKDDGNYKTRAEVKFEGDTLVNRIELKGIDFKEDGNILGHKLEYNYISHNVYITADKQKNGIKANFKIRHNIEDGSVQLADHYQQNTPIGDGPVLLPDNHYLSTQSALSKDPNEKRDHMVLLEFVTAAGITLGMDELYKGSGATNFSLLKQAGDVEENPGPGSVSSVPTKLEVVAATPTSLLISWDAPAVTVLYYLITYGETGDHWSGHQAFEVPGSKSTATISGLKPGVDYTITVYAHAESYGESYSPISINYRTDEKLALYLAEVEKQDKYLRQRNKYRFHIIPDGNCLYRAVSKTVYGDQSLHRELREQTVHYIADHLDHFSPLIEGDVGEFIIAAAQDGAWAGYPELLAMGQMLNVNIHLTTGGRLESPTVSTMIHYLGPEDSLRPSIWLSWLSNGHYDAVFDHSYPNPEYDNWCKQTQVQRKRDEELAKSMAISLSKMYIEQNACS

SEQ ID NO: 273 - protein, 809 aa, Artificial Sequence
  Description of Artificial Sequence: Synthetic polypeptide
MVSKGEELFTGVVPILVELDGDVNGHKFSVSGEGEGDATYGKLTLKFICTTGKLPVPWPTLVTTLTWGVQCFSRYPDHMKQHDFFKSAMPEGYVQERTIFFKDDGNYKTRAEVKFEGDTLVNRIELKGIDFKEDGNILGHKLEYNYISHNVYITADKQKNGIKANFKIRHNIEDGSVQLADHYQQNTPIGDGPVLLPDNHYLSTQSALSKDPNEKRDHMVLLEFVTAAGITLGMDELYKGSGATNFSLLKQAGDVEENPGPGSVSSVPTKLEVVAATPTSLLISWDAPAVTVLYYLITYGETGDHWSGHQAFEVPGSKSTATISGLKPGVDYTITVYAHAESYGESYSPISINYRTLEVDFKKLKQIKNRMKKTDWLFLNACVGVVEGDLAAIEAYKSSGGDIARQLTADEVRLLNRPSAFDVGYTLVHLAIRFQRQDMLAILLTEVSQQAAKCIPAMVCPELTEQIRREIAASLHQRKGDFACYFLTDLVTFTLPADIEDLPPTVQEKLFDEVLDRDVQKELEEESPIINWSLELATRLDSRLYALWNRTAGDCLLDSVLQATWGIYDKDSVLRKALHDSLHDCSHWFYTRWKDWESWYSQSFGLHFSLREEQWQEDWAFILSLASQPGASLEQTHIFVLAHILRRPIIVYGVKYYKSFRGETLGYTRFQGVYLPLLWEQSFCWKSPIALGYTRGHFSALVAMENDGYGNRGAGANLNTDDDVTITFLPLVDSERKLLHVHFLSAQELGNEEQQEKLLREWLDCCVTEGGVLVAMQKSSRRRNHPLVTQMVEKWLDRYRQIRPCTSLS

SEQ ID NO: 274 - protein, 711 aa, Artificial Sequence
  Description of Artificial Sequence: Synthetic polypeptide
MVSKGEELFTGVVPILVELDGDVNGHKFSVSGEGEGDATYGKLTLKFICTTGKLPVPWPTLVTTLTWGVQCFSRYPDHMKQHDFFKSAMPEGYVQERTIFFKDDGNYKTRAEVKFEGDTLVNRIELKGIDFKEDGNILGHKLEYNYISHNVYITADKQKNGIKANFKIRHNIEDGSVQLADHYQQNTPIGDGPVLLPDNHYLSTQSALSKDPNEKRDHMVLLEFVTAAGITLGMDELYKGSGATNFGSVSSVPTKLEVVAATPTSLLISWDAPAVTVLYYLITYGETGDHWSGHQAFEVPGSKSTATISGLKPGVDYTITVYAHAESYGESYSPISINYRTSDDKMAHHTLLLGSGHVGLRNLGNTCFLNAVLQCLSSTRPLRDFCLRRDFRQEVPGGGRAQELTEAFADVIGALWHPDSCEAVNPTRFRAVFQKYVPSFSGYSQQDAQEFLKLLMERLHLEINRRGRRAPPILANGPVPSPPRRGGALLEEPELSDDDRANLMWKRYLEREDSKIVDLFVGQLKSCLKCQACGYRSTTFEVFCDLSLPIPKKGFAGGKVSLRDCFNLFTKEEELESENAPVCDRCRQKTRSTKKLTVQRFPRILVLHLNRFSASRGSIKKSSVGVDFPLQRLSLGDFASDKAGSPVYQLYALCNHSGSVHYGHYTALCRCQTGWHVYNDSRVSPVSENQVASSEGYVLFYQLMQEPPRCL

SEQ ID NO: 275 - protein, 531 aa, Artificial Sequence
  Description of Artificial Sequence: Synthetic polypeptide
MVSKGEELFTGVVPILVELDGDVNGHKFSVSGEGEGDATYGKLTLKFICTTGKLPVPWPTLVTTLTWGVQCFSRYPDHMKQHDFFKSAMPEGYVQERTIFFKDDGNYKTRAEVKFEGDTLVNRIELKGIDFKEDGNILGHKLEYNYISHNVYITADKQKNGIKANFKIRHNIEDGSVQLADHYQQNTPIGDGPVLLPDNHYLSTQSALSKDPNEKRDHMVLLEFVTAAGITLGMDELYKGSGATNFSLLKQAGDVEENPGPGSVSSVPTKLEVVAATPTSLLISWDAPAVTVLYYLITYGETGDHWSGHQAFEVPGSKSTATISGLKPGVDYTITVYAHAESYGESYSPISINYRTATPMDAYLRKLGLYRKLVAKDGSCLFRAVAEQVLHSQSRHVEVRMACIHYLRENREKFEAFIEGSFEEYLKRLENPQEWVGQVEISALSLMYRKDFIIYREPNVSPSQVTENNFPEKVLLCFSNGNHYDIVYPIKYKESSAMCQSLLYELLYEKVFKTDVSKIVMELDTLEVADE

SEQ ID NO: 276 - protein, 753 aa, Artificial Sequence
  Description of Artificial Sequence: Synthetic polypeptide
MVSKGEELFTGVVPILVELDGDVNGHKFSVSGEGEGDATYGKLTLKFICTTGKLPVPWPTLVTTLTWGVQCFSRYPDHMKQHDFFKSAMPEGYVQERTIFFKDDGNYKTRAEVKFEGDTLVNRIELKGIDFKEDGNILGHKLEYNYISHNVYITADKQKNGIKANFKIRHNIEDGSVQLADHYQQNTPIGDGPVLLPDNHYLSTQSALSKDPNEKRDHMVLLEFVTAAGITLGMDELYKGSGATNFSLLKQAGDVEENPGPGSVSSVPTKLEVVAATPTSLLISWDAPAVTVDYYFITYGETGGNSPVQEFTVPGSKSTATISGLKPGVDYTITVYAWYYYDDEYYMNESSPISINYRTPPSFSEGSGGSRTPEKGFSDREPTRPPRPILQRQDDIVQEKRLSRGISHASSSIVSLARSHVSSNGGGGGSNEHPLEMPICAFQLPDLTVYNEDFRSFIERDLIEQSMLVALEQAGRLNWWVSVDPTSQRLLPLATTGDGNCLLHAASLGMWGFHDRDLMLRKALYALMEKGVEKEALKRRWRWQQTQQNKESGLVYTEDEWQKEWNELIKLASSEPRMHLGTNGANCGGVESSEEPVYESLEEFHVFVLAHVLRRPIVVVADTMLRDSGGEAFAPIPFGGIYLPLEVPASQCHRSPLVLAYDQAHFSALVSMEQKENTKEQAVIPLTDSEYKLLPLHFAVDPGKGWEWGKDDSDNVRLASVILSLEVKLHLLHSYMNVKWIPLSSDAQAPLAQ

SEQ ID NO: 277 - protein, 554 aa, Artificial Sequence
  Description of Artificial Sequence: Synthetic polypeptide
MVSKGEELFTGVVPILVELDGDVNGHKFSVSGEGEGDATYGKLTLKFICTTGKLPVPWPTLVTTLTWGVQCFSRYPDHMKQHDFFKSAMPEGYVQERTIFFKDDGNYKTRAEVKFEGDTLVNRIELKGIDFKEDGNILGHKLEYNYISHNVYITADKQKNGIKANFKIRHNIEDGSVQLADHYQQNTPIGDGPVLLPDNHYLSTQSALSKDPNEKRDHMVLLEFVTAAGITLGMDELYKGSGATNFSLLKQAGDVEENPGPGSVSSVPTKLEVVAATPTSLLISWDAPAVTVDYYFITYGETGGNSPVQEFTVPGSKSTATISGLKPGVDYTITVYAWYYYDDEYYMNESSPISINYRTDEKLALYLAEVEKQDKYLRQRNKYRFHIIPDGNCLYRAVSKTVYGDQSLHRELREQTVHYIADHLDHFSPLIEGDVGEFIIAAAQDGAWAGYPELLAMGQMLNVNIHLTTGGRLESPTVSTMIHYLGPEDSLRPSIWLSWLSNGHYDAVFDHSYPNPEYDNWCKQTQVQRKRDEELAKSMAISLSKMYIEQNACS

SEQ ID NO: 278 - protein, 812 aa, Artificial Sequence
  Description of Artificial Sequence: Synthetic polypeptide
MVSKGEELFTGVVPILVELDGDVNGHKFSVSGEGEGDATYGKLTLKFICTTGKLPVPWPTLVTTLTWGVQCFSRYPDHMKQHDFFKSAMPEGYVQERTIFFKDDGNYKTRAEVKFEGDTLVNRIELKGIDFKEDGNILGHKLEYNYISHNVYITADKQKNGIKANFKIRHNIEDGSVQLADHYQQNTPIGDGPVLLPDNHYLSTQSALSKDPNEKRDHMVLLEFVTAAGITLGMDELYKGSGATNFSLLKQAGDVEENPGPGSVSSVPTKLEVVAATPTSLLISWDAPAVTVDYYFITYGETGGNSPVQEFTVPGSKSTATISGLKPGVDYTITVYAWYYYDDEYYMNESSPISINYRTLEVDFKKLKQIKNRMKKTDWLFLNACVGVVEGDLAAIEAYKSSGGDIARQLTADEVRLLNRPSAFDVGYTLVHLAIRFQRQDMLAILLTEVSQQAAKCIPAMVCPELTEQIRREIAASLHQRKGDFACYFLTDLVTFTLPADIEDLPPTVQEKLFDEVLDRDVQKELEEESPIINWSLELATRLDSRLYALWNRTAGDCLLDSVLQATWGIYDKDSVLRKALHDSLHDCSHWFYTRWKDWESWYSQSFGLHFSLREEQWQEDWAFILSLASQPGASLEQTHIFVLAHILRRPIIVYGVKYYKSFRGETLGYTRFQGVYLPLLWEQSFCWKSPIALGYTRGHFSALVAMENDGYGNRGAGANLNTDDDVTITFLPLVDSERKLLHVHFLSAQELGNEEQQEKLLREWLDCCVTEGGVLVAMQKSSRRRNHPLVTQMVEKWLDRYRQIRPCTSLS

SEQ ID NO: 279 - protein, 729 aa, Artificial Sequence
  Description of Artificial Sequence: Synthetic polypeptide
MVSKGEELFTGVVPILVELDGDVNGHKFSVSGEGEGDATYGKLTLKFICTTGKLPVPWPTLVTTLTWGVQCFSRYPDHMKQHDFFKSAMPEGYVQERTIFFKDDGNYKTRAEVKFEGDTLVNRIELKGIDFKEDGNILGHKLEYNYISHNVYITADKQKNGIKANFKIRHNIEDGSVQLADHYQQNTPIGDGPVLLPDNHYLSTQSALSKDPNEKRDHMVLLEFVTAAGITLGMDELYKGSGATNFSLLKQAGDVEENPGPGSVSSVPTKLEVVAATPTSLLISWDAPAVTVDYYFITYGETGGNSPVQEFTVPGSKSTATISGLKPGVDYTITVYAWYYYDDEYYMNESSPISINYRTSDDKMAHHTLLLGSGHVGLRNLGNTCFLNAVLQCLSSTRPLRDFCLRRDFRQEVPGGGRAQELTEAFADVIGALWHPDSCEAVNPTRFRAVFQKYVPSFSGYSQQDAQEFLKLLMERLHLEINRRGRRAPPILANGPVPSPPRRGGALLEEPELSDDDRANLMWKRYLEREDSKIVDLFVGQLKSCLKCQACGYRSTTFEVFCDLSLPIPKKGFAGGKVSLRDCFNLFTKEEELESENAPVCDRCRQKTRSTKKLTVQRFPRILVLHLNRFSASRGSIKKSSVGVDFPLQRLSLGDFASDKAGSPVYQLYALCNHSGSVHYGHYTALCRCQTGWHVYNDSRVSPVSENQVASSEGYVLFYQLMQEPPRCL

SEQ ID NO: 280 - protein, 534 aa, Artificial Sequence
  Description of Artificial Sequence: Synthetic polypeptide
MVSKGEELFTGVVPILVELDGDVNGHKFSVSGEGEGDATYGKLTLKFICTTGKLPVPWPTLVTTLTWGVQCFSRYPDHMKQHDFFKSAMPEGYVQERTIFFKDDGNYKTRAEVKFEGDTLVNRIELKGIDFKEDGNILGHKLEYNYISHNVYITADKQKNGIKANFKIRHNIEDGSVQLADHYQQNTPIGDGPVLLPDNHYLSTQSALSKDPNEKRDHMVLLEFVTAAGITLGMDELYKGSGATNFSLLKQAGDVEENPGPGSVSSVPTKLEVVAATPTSLLISWDAPAVTVDYYFITYGETGGNSPVQEFTVPGSKSTATISGLKPGVDYTITVYAWYYYDDEYYMNESSPISINYRTATPMDAYLRKLGLYRKLVAKDGSCLFRAVAEQVLHSQSRHVEVRMACIHYLRENREKFEAFIEGSFEEYLKRLENPQEWVGQVEISALSLMYRKDFIIYREPNVSPSQVTENNFPEKVLLCFSNGNHYDIVYPIKYKESSAMCQSLLYELLYEKVFKTDVSKIVMELDTLEVADE

SEQ ID NO: 281 - protein, 748 aa, Artificial Sequence
  Description of Artificial Sequence: Synthetic polypeptide
MVSKGEELFTGVVPILVELDGDVNGHKFSVSGEGEGDATYGKLTLKFICTTGKLPVPWPTLVTTLTWGVQCFSRYPDHMKQHDFFKSAMPEGYVQERTIFFKDDGNYKTRAEVKFEGDTLVNRIELKGIDFKEDGNILGHKLEYNYISHNVYITADKQKNGIKANFKIRHNIEDGSVQLADHYQQNTPIGDGPVLLPDNHYLSTQSALSKDPNEKRDHMVLLEFVTAAGITLGMDELYKGSGATNFSLLKQAGDVEENPGPGSVSSVPTKLEVVAATPTSLLISWDAPAVTVVHYVITYGETGGNSPVQEFTVPGSKSTATISGLKPGVDYTITVYAIDFYWGSYSPISINYRTPPSFSEGSGGSRTPEKGFSDREPTRPPRPILQRQDDIVQEKRLSRGISHASSSIVSLARSHVSSNGGGGGSNEHPLEMPICAFQLPDLTVYNEDFRSFIERDLIEQSMLVALEQAGRLNWWVSVDPTSQRLLPLATTGDGNCLLHAASLGMWGFHDRDLMLRKALYALMEKGVEKEALKRRWRWQQTQQNKESGLVYTEDEWQKEWNELIKLASSEPRMHLGTNGANCGGVESSEEPVYESLEEFHVFVLAHVLRRPIVVVADTMLRDSGGEAFAPIPFGGIYLPLEVPASQCHRSPLVLAYDQAHFSALVSMEQKENTKEQAVIPLTDSEYKLLPLHFAVDPGKGWEWGKDDSDNVRLASVILSLEVKLHLLHSYMNVKWIPLSSDAQAPLAQ

SEQ ID NO: 282 - protein, 549 aa, Artificial Sequence
  Description of Artificial Sequence: Synthetic polypeptide
MVSKGEELFTGVVPILVELDGDVNGHKFSVSGEGEGDATYGKLTLKFICTTGKLPVPWPTLVTTLTWGVQCFSRYPDHMKQHDFFKSAMPEGYVQERTIFFKDDGNYKTRAEVKFEGDTLVNRIELKGIDFKEDGNILGHKLEYNYISHNVYITADKQKNGIKANFKIRHNIEDGSVQLADHYQQNTPIGDGPVLLPDNHYLSTQSALSKDPNEKRDHMVLLEFVTAAGITLGMDELYKGSGATNFSLLKQAGDVEENPGPGSVSSVPTKLEVVAATPTSLLISWDAPAVTVVHYVITYGETGGNSPVQEFTVPGSKSTATISGLKPGVDYTITVYAIDFYWGSYSPISINYRTDEKLALYLAEVEKQDKYLRQRNKYRFHIIPDGNCLYRAVSKTVYGDQSLHRELREQTVHYIADHLDHFSPLIEGDVGEFIIAAAQDGAWAGYPELLAMGQMLNVNIHLTTGGRLESPTVSTMIHYLGPEDSLRPSIWLSWLSNGHYDAVFDHSYPNPEYDNWCKQTQVQRKRDEELAKSMAISLSKMYIEQNACS

SEQ ID NO: 283 - protein, 807 aa, Artificial Sequence
  Description of Artificial Sequence: Synthetic polypeptide
MVSKGEELFTGVVPILVELDGDVNGHKFSVSGEGEGDATYGKLTLKFICTTGKLPVPWPTLVTTLTWGVQCFSRYPDHMKQHDFFKSAMPEGYVQERTIFFKDDGNYKTRAEVKFEGDTLVNRIELKGIDFKEDGNILGHKLEYNYISHNVYITADKQKNGIKANFKIRHNIEDGSVQLADHYQQNTPIGDGPVLLPDNHYLSTQSALSKDPNEKRDHMVLLEFVTAAGITLGMDELYKGSGATNFSLLKQAGDVEENPGPGSVSSVPTKLEVVAATPTSLLISWDAPAVTVVHYVITYGETGGNSPVQEFTVPGSKSTATISGLKPGVDYTITVYAIDFYWGSYSPISINYRTLEVDFKKLKQIKNRMKKTDWLFLNACVGVVEGDLAAIEAYKSSGGDIARQLTADEVRLLNRPSAFDVGYTLVHLAIRFQRQDMLAILLTEVSQQAAKCIPAMVCPELTEQIRREIAASLHQRKGDFACYFLTDLVTFTLPADIEDLPPTVQEKLFDEVLDRDVQKELEEESPIINWSLELATRLDSRLYALWNRTAGDCLLDSVLQATWGIYDKDSVLRKALHDSLHDCSHWFYTRWKDWESWYSQSFGLHFSLREEQWQEDWAFILSLASQPGASLEQTHIFVLAHILRRPIIVYGVKYYKSFRGETLGYTRFQGVYLPLLWEQSFCWKSPIALGYTRGHFSALVAMENDGYGNRGAGANLNTDDDVTITFLPLVDSERKLLHVHFLSAQELGNEEQQEKLLREWLDCCVTEGGVLVAMQKSSRRRNHPLVTQMVEKWLDRYRQIRPCTSLS

SEQ ID NO: 284 - protein, 724 aa, Artificial Sequence
  Description of Artificial Sequence: Synthetic polypeptide
MVSKGEELFTGVVPILVELDGDVNGHKFSVSGEGEGDATYGKLTLKFICTTGKLPVPWPTLVTTLTWGVQCFSRYPDHMKQHDFFKSAMPEGYVQERTIFFKDDGNYKTRAEVKFEGDTLVNRIELKGIDFKEDGNILGHKLEYNYISHNVYITADKQKNGIKANFKIRHNIEDGSVQLADHYQQNTPIGDGPVLLPDNHYLSTQSALSKDPNEKRDHMVLLEFVTAAGITLGMDELYKGSGATNFSLLKQAGDVEENPGPGSVSSVPTKLEVVAATPTSLLISWDAPAVTVVHYVITYGETGGNSPVQEFTVPGSKSTATISGLKPGVDYTITVYAIDFYWGSYSPISINYRTSDDKMAHHTLLLGSGHVGLRNLGNTCFLNAVLQCLSSTRPLRDFCLRRDFRQEVPGGGRAQELTEAFADVIGALWHPDSCEAVNPTRFRAVFQKYVPSFSGYSQQDAQEFLKLLMERLHLEINRRGRRAPPILANGPVPSPPRRGGALLEEPELSDDDRANLMWKRYLEREDSKIVDLFVGQLKSCLKCQACGYRSTTFEVFCDLSLPIPKKGFAGGKVSLRDCFNLFTKEEELESENAPVCDRCRQKTRSTKKLTVQRFPRILVLHLNRFSASRGSIKKSSVGVDFPLQRLSLGDFASDKAGSPVYQLYALCNHSGSVHYGHYTALCRCQTGWHVYNDSRVSPVSENQVASSEGYVLFYQLMQEPPRCL

SEQ ID NO: 285 - protein, 529 aa, Artificial Sequence
  Description of Artificial Sequence: Synthetic polypeptide
MVSKGEELFTGVVPILVELDGDVNGHKFSVSGEGEGDATYGKLTLKFICTTGKLPVPWPTLVTTLTWGVQCFSRYPDHMKQHDFFKSAMPEGYVQERTIFFKDDGNYKTRAEVKFEGDTLVNRIELKGIDFKEDGNILGHKLEYNYISHNVYITADKQKNGIKANFKIRHNIEDGSVQLADHYQQNTPIGDGPVLLPDNHYLSTQSALSKDPNEKRDHMVLLEFVTAAGITLGMDELYKGSGATNFSLLKQAGDVEENPGPGSVSSVPTKLEVVAATPTSLLISWDAPAVTVVHYVITYGETGGNSPVQEFTVPGSKSTATISGLKPGVDYTITVYAIDFYWGSYSPISINYRTATPMDAYLRKLGLYRKLVAKDGSCLFRAVAEQVLHSQSRHVEVRMACIHYLRENREKFEAFIEGSFEEYLKRLENPQEWVGQVEISALSLMYRKDFIIYREPNVSPSQVTENNFPEKVLLCFSNGNHYDIVYPIKYKESSAMCQSLLYELLYEKVFKTDVSKIVMELDTLEVADE

SEQ ID NO: 286 - protein, 394 aa, Homo sapiens; identical to SEQ ID NO: 252

SEQ ID NO: 287 - protein, 97 aa, Homo sapiens
MASSAELDFNLQALLEQLSQDELSKFKSLIRTISLGKELQTVPQTEVDKANGKQLVEIFTSHSCSYWAGMAAIQVFEKMNQTHLSGRADEHCVMPPP

SEQ ID NO: 288 - protein, 98 aa, Homo sapiens
MMCGAPSATQPATAETQHIADQVRSQLEEKENKKFPVFKAVSFKSQVVAGTNYFIKVHVGDEDFVHLRVFQSLPHENKPLTLSNYQTNKAKHDELTYF

SEQ ID NO: 289 - protein, 104 aa, Homo sapiens
MAGKAHRLSAEERDQLLPNLRAVGWNELEGRDAIFKQFHFKDFNRAFGFMTRVALQAEKLDHHPEWFNVYNKVHITLSTHECAGLSERDINLASFIEQVAVSMT

SEQ ID NO: 290 - protein, 8 aa, Artificial Sequence
  Description of Artificial Sequence: Synthetic peptide
GFSFSNFP

SEQ ID NO: 291 - protein, 8 aa, Artificial Sequence
  Description of Artificial Sequence: Synthetic peptide
INQDGRNT

SEQ ID NO: 292 - protein, 11 aa, Artificial Sequence
  Description of Artificial Sequence: Synthetic peptide
QAIRTTTHFDS

SEQ ID NO: 293 - protein, 118 aa, Artificial Sequence
  Description of Artificial Sequence: Synthetic polypeptide
QVQLVESGGGLVQPGGSLRLSCAASGFSFSNFPMMWVRQAPGKGREWVADINQDGRNTYYADSVKGRFTISRDNAKTTVYLQMNNLNPEDTAVYYCQAIRTTTHFDSWGQGTQVTVSS

SEQ ID NO: 294 - protein, 8 aa, Artificial Sequence
  Description of Artificial Sequence: Synthetic peptide
GFTFSNYR

SEQ ID NO: 295 - protein, 8 aa, Artificial Sequence
  Description of Artificial Sequence: Synthetic peptide
IDRSGTYT

SEQ ID NO: 296 - protein, 17 aa, Artificial Sequence
  Description of Artificial Sequence: Synthetic peptide
AADRRLIVDLTPEVYDH

SEQ ID NO: 297 - protein, 124 aa, Artificial Sequence
  Description of Artificial Sequence: Synthetic polypeptide
QLQLVESGGGLVQPGESLRLSCAASGFTFSNYRMYWVRMAPGKGLEWVSDIDRSGTYTYYADSVKGRFAISRDNAKNTVYLQMNSLKPEDTAVYYCAADRRLIVDLTPEVYDHWGQGTQVTVSS

SEQ ID NO: 298 - protein, 8 aa, Artificial Sequence
  Description of Artificial Sequence: Synthetic peptide
GFIFSSYQ

SEQ ID NO: 299 - protein, 8 aa, Artificial Sequence
  Description of Artificial Sequence: Synthetic peptide
INTGGWNT

SEQ ID NO: 300 - protein, 19 aa, Artificial Sequence
  Description of Artificial Sequence: Synthetic peptide
AADRWMVAKIVGGDLDFDS

SEQ ID NO: 301 - protein, 126 aa, Artificial Sequence
  Description of Artificial Sequence: Synthetic polypeptide
QVQLVESGGGLVQPGGSLRLSCAASGFIFSSYQMAWVRQAPGKGLEWVADINTGGWNTYYADSVKGRFTISRDNAKNTLYLEMNSLKPEDTAVYYCAADRWMVAKIVGGDLDFDSWGQGTQVTVSS

SEQ ID NO: 302 - protein, 8 aa, Artificial Sequence
  Description of Artificial Sequence: Synthetic peptide
GFAFGSYD

SEQ ID NO: 303 - protein, 8 aa, Artificial Sequence
  Description of Artificial Sequence: Synthetic peptide
ITPGGGGT

SEQ ID NO: 304 - protein, 12 aa, Artificial Sequence
  Description of Artificial Sequence: Synthetic peptide
YYCAKNFYGNGG

SEQ ID NO: 305 - protein, 119 aa, Artificial Sequence
  Description of Artificial Sequence: Synthetic polypeptide
QVQLVESGGGLVQPGGSLRLSCAASGFAFGSYDMSWVRQAPGQGPEWVSAITPGGGGTFYAYYSDSVKGRFAISRDNAKNTLTLQMNSLKPDDTAMYYCAKNFYGNGGRGHGTQVTVSS

SEQ ID NO: 306 - protein, 8 aa, Artificial Sequence
  Description of Artificial Sequence: Synthetic peptide
GFTFGTHA

SEQ ID NO: 307 - protein, 8 aa, Artificial Sequence
  Description of Artificial Sequence: Synthetic peptide
ISSGGGGT

SEQ ID NO: 308 - protein, 10 aa, Artificial Sequence
  Description of Artificial Sequence: Synthetic peptide
NSPSNIANDN

SEQ ID NO: 309 - protein, 117 aa, Artificial Sequence
  Description of Artificial Sequence: Synthetic polypeptide
QVQLVESGGGLVQPGGSLRLACAASGFTFGTHAMHWVRWAPGKGFEWVSTISSGGGGTRYADSVKGRFTISRDNAKNTVYLQMDNLKPEDTAVYYCNSPSNIANDNWGQGTQVTVSS

SEQ ID NO: 310 - protein, 8 aa, Artificial Sequence
  Description of Artificial Sequence: Synthetic peptide
ERTFGHYA

SEQ ID NO: 311 - protein, 8 aa, Artificial Sequence
  Description of Artificial Sequence: Synthetic peptide
ISWKGGTT

SEQ ID NO: 312 - protein, 17 aa, Artificial Sequence
  Description of Artificial Sequence: Synthetic peptide
AARNTMSGSMSSSAYPY

SEQ ID NO: 313 - protein, 124 aa, Artificial Sequence
  Description of Artificial Sequence: Synthetic polypeptide
QVQLVESGGGLVQAGASLRLSCAASERTFGHYAMGWFRQAPGKEREFVATISWKGGTTGYAHSVKGRFTISRDSAKNMVYLQMNSLKPEDTAVYYCAARNTMSGSMSSSAYPYWGQGTQVTVSS

SEQ ID NO: 314 - protein, 256 aa, Artificial Sequence
  Description of Artificial Sequence: Synthetic polypeptide
QVQLVESGGGLVQPGGSLRLSCAASGFSFSNFPMMWVRQAPGKGREWVADINQDGRNTYYADSVKGRFTISRDNAKTTVYLQMNNLNPEDTAVYYCQAIRTTTHFDSWGQGTQVTVSSGGGGSGGGGSGGGGSGGGGSQVQLVESGGGLVQPGGSLRLSCAASGFSFSNFPMMWVRQAPGKGREWVADINQDGRNTYYADSVKGRFTISRDNAKTTVYLQMNNLNPEDTAVYYCQAIRTTTHFDSWGQGTQVTVSS

SEQ ID NO: 315 - protein, 268 aa, Artificial Sequence
  Description of Artificial Sequence: Synthetic polypeptide
QLQLVESGGGLVQPGESLRLSCAASGFTFSNYRMYWVRMAPGKGLEWVSDIDRSGTYTYYADSVKGRFAISRDNAKNTVYLQMNSLKPEDTAVYYCAADRRLIVDLTPEVYDHWGQGTQVTVSSGGGGSGGGGSGGGGSGGGGSQLQLVESGGGLVQPGESLRLSCAASGFTFSNYRMYWVRMAPGKGLEWVSDIDRSGTYTYYADSVKGRFAISRDNAKNTVYLQMNSLKPEDTAVYYCAADRRLIVDLTPEVYDHWGQGTQVTVSS

SEQ ID NO: 316 - protein, 272 aa, Artificial Sequence
  Description of Artificial Sequence: Synthetic polypeptide
QVQLVESGGGLVQPGGSLRLSCAASGFIFSSYQMAWVRQAPGKGLEWVADINTGGWNTYYADSVKGRFTISRDNAKNTLYLEMNSLKPEDTAVYYCAADRWMVAKIVGGDLDFDSWGQGTQVTVSSGGGGSGGGGSGGGGSGGGGSQVQLVESGGGLVQPGGSLRLSCAASGFIFSSYQMAWVRQAPGKGLEWVADINTGGWNTYYADSVKGRFTISRDNAKNTLYLEMNSLKPEDTAVYYCAADRWMVAKIVGGDLDFDSWGQGTQVTVSS

SEQ ID NO: 317 - protein, 258 aa, Artificial Sequence
  Description of Artificial Sequence: Synthetic polypeptide
QVQLVESGGGLVQPGGSLRLSCAASGFAFGSYDMSWVRQAPGQGPEWVSAITPGGGGTFYAYYSDSVKGRFAISRDNAKNTLTLQMNSLKPDDTAMYYCAKNFYGNGGRGHGTQVTVSSGGGGSGGGGSGGGGSGGGGSQVQLVESGGGLVQPGGSLRLSCAASGFAFGSYDMSWVRQAPGQGPEWVSAITPGGGGTFYAYYSDSVKGRFAISRDNAKNTLTLQMNSLKPDDTAMYYCAKNFYGNGGRGHGTQVTVSS

SEQ ID NO: 318 - protein, 254 aa, Artificial Sequence
  Description of Artificial Sequence: Synthetic polypeptide
QVQLVESGGGLVQPGGSLRLACAASGFTFGTHAMHWVRWAPGKGFEWVSTISSGGGGTRYADSVKGRFTISRDNAKNTVYLQMDNLKPEDTAVYYCNSPSNIANDNWGQGTQVTVSSGGGGSGGGGSGGGGSGGGGSQVQLVESGGGLVQPGGSLRLACAASGFTFGTHAMHWVRWAPGKGFEWVSTISSGGGGTRYADSVKGRFTISRDNAKNTVYLQMDNLKPEDTAVYYCNSPSNIANDNWGQGTQVTVSS

SEQ ID NO: 319 - protein, 268 aa, Artificial Sequence
  Description of Artificial Sequence: Synthetic polypeptide
QVQLVESGGGLVQAGASLRLSCAASERTFGHYAMGWFRQAPGKEREFVATISWKGGTTGYAHSVKGRFTISRDSAKNMVYLQMNSLKPEDTAVYYCAARNTMSGSMSSSAYPYWGQGTQVTVSSGGGGSGGGGSGGGGSGGGGSQVQLVESGGGLVQAGASLRLSCAASERTFGHYAMGWFRQAPGKEREFVATISWKGGTTGYAHSVKGRFTISRDSAKNMVYLQMNSLKPEDTAVYYCAARNTMSGSMSSSAYPYWGQGTQVTVSS

SEQ ID NO: 320 - protein, 512 aa, Artificial Sequence
  Description of Artificial Sequence: Synthetic polypeptide
QVQLVESGGGLVQPGGSLRLSCAASGFSFSNFPMMWVRQAPGKGREWVADINQDGRNTYYADSVKGRFTISRDNAKTTVYLQMNNLNPEDTAVYYCQAIRTTTHFDSWGQGTQVTVSSPPSFSEGSGGSRTPEKGFSDREPTRPPRPILQRQDDIVQEKRLSRGISHASSSIVSLARSHVSSNGGGGGSNEHPLEMPICAFQLPDLTVYNEDFRSFIERDLIEQSMLVALEQAGRLNWWVSVDPTSQRLLPLATTGDGNCLLHAASLGMWGFHDRDLMLRKALYALMEKGVEKEALKRRWRWQQTQQNKESGLVYTEDEWQKEWNELIKLASSEPRMHLGTNGANCGGVESSEEPVYESLEEFHVFVLAHVLRRPIVVVADTMLRDSGGEAFAPIPFGGIYLPLEVPASQCHRSPLVLAYDQAHFSALVSMEQKENTKEQAVIPLTDSEYKLLPLHFAVDPGKGWEWGKDDSDNVRLASVILSLEVKLHLLHSYMNVKWIPLSSDAQAPLAQ

SEQ ID NO: 321 - protein, 518 aa, Artificial Sequence
  Description of Artificial Sequence: Synthetic polypeptide
QLQLVESGGGLVQPGESLRLSCAASGFTFSNYRMYWVRMAPGKGLEWVSDIDRSGTYTYYADSVKGRFAISRDNAKNTVYLQMNSLKPEDTAVYYCAADRRLIVDLTPEVYDHWGQGTQVTVSSPPSFSEGSGGSRTPEKGFSDREPTRPPRPILQRQDDIVQEKRLSRGISHASSSIVSLARSHVSSNGGGGGSNEHPLEMPICAFQLPDLTVYNEDFRSFIERDLIEQSMLVALEQAGRLNWWVSVDPTSQRLLPLATTGDGNCLLHAASLGMWGFHDRDLMLRKALYALMEKGVEKEALKRRWRWQQTQQNKESGLVYTEDEWQKEWNELIKLASSEPRMHLGTNGANCGGVESSEEPVYESLEEFHVFVLAHVLRRPIVVVADTMLRDSGGEAFAPIPFGGIYLPLEVPASQCHRSPLVLAYDQAHFSALVSMEQKENTKEQAVIPLTDSEYKLLPLHFAVDPGKGWEWGKDDSDNVRLASVILSLEVKLHLLHSYMNVKWIPLSSDAQAPLAQ

SEQ ID NO: 322 - protein, 520 aa, Artificial Sequence
  Description of Artificial Sequence: Synthetic polypeptide
QVQLVESGGGLVQPGGSLRLSCAASGFIFSSYQMAWVRQAPGKGLEWVADINTGGWNTYYADSVKGRFTISRDNAKNTLYLEMNSLKPEDTAVYYCAADRWMVAKIVGGDLDFDSWGQGTQVTVSSPPSFSEGSGGSRTPEKGFSDREPTRPPRPILQRQDDIVQEKRLSRGISHASSSIVSLARSHVSSNGGGGGSNEHPLEMPICAFQLPDLTVYNEDFRSFIERDLIEQSMLVALEQAGRLNWWVSVDPTSQRLLPLATTGDGNCLLHAASLGMWGFHDRDLMLRKALYALMEKGVEKEALKRRWRWQQTQQNKESGLVYTEDEWQKEWNELIKLASSEPRMHLGTNGANCGGVESSEEPVYESLEEFHVFVLAHVLRRPIVVVADTMLRDSGGEAFAPIPFGGIYLPLEVPASQCHRSPLVLAYDQAHFSALVSMEQKENTKEQAVIPLTDSEYKLLPLHFAVDPGKGWEWGKDDSDNVRLASVILSLEVKLHLLHSYMNVKWIPLSSDAQAPLAQ

SEQ ID NO: 323 - protein, 513 aa, Artificial Sequence
  Description of Artificial Sequence: Synthetic polypeptide
QVQLVESGGGLVQPGGSLRLSCAASGFAFGSYDMSWVRQAPGQGPEWVSAITPGGGGTFYAYYSDSVKGRFAISRDNAKNTLTLQMNSLKPDDTAMYYCAKNFYGNGGRGHGTQVTVSSPPSFSEGSGGSRTPEKGFSDREPTRPPRPILQRQDDIVQEKRLSRGISHASSSIVSLARSHVSSNGGGGGSNEHPLEMPICAFQLPDLTVYNEDFRSFIERDLIEQSMLVALEQAGRLNWWVSVDPTSQRLLPLATTGDGNCLLHAASLGMWGFHDRDLMLRKALYALMEKGVEKEALKRRWRWQQTQQNKESGLVYTEDEWQKEWNELIKLASSEPRMHLGTNGANCGGVESSEEPVYESLEEFHVFVLAHVLRRPIVVVADTMLRDSGGEAFAPIPFGGIYLPLEVPASQCHRSPLVLAYDQAHFSALVSMEQKENTKEQAVIPLTDSEYKLLPLHFAVDPGKGWEWGKDDSDNVRLASVILSLEVKLHLLHSYMNVKWIPLSSDAQAPLAQ

SEQ ID NO: 324 - protein, 511 aa, Artificial Sequence
  Description of Artificial Sequence: Synthetic polypeptide
QVQLVESGGGLVQPGGSLRLACAASGFTFGTHAMHWVRWAPGKGFEWVSTISSGGGGTRYADSVKGRFTISRDNAKNTVYLQMDNLKPEDTAVYYCNSPSNIANDNWGQGTQVTVSSPPSFSEGSGGSRTPEKGFSDREPTRPPRPILQRQDDIVQEKRLSRGISHASSSIVSLARSHVSSNGGGGGSNEHPLEMPICAFQLPDLTVYNEDFRSFIERDLIEQSMLVALEQAGRLNWWVSVDPTSQRLLPLATTGDGNCLLHAASLGMWGFHDRDLMLRKALYALMEKGVEKEALKRRWRWQQTQQNKESGLVYTEDEWQKEWNELIKLASSEPRMHLGTNGANCGGVESSEEPVYESLEEFHVFVLAHVLRRPIVVVADTMLRDSGGEAFAPIPFGGIYLPLEVPASQCHRSPLVLAYDQAHFSALVSMEQKENTKEQAVIPLTDSEYKLLPLHFAVDPGKGWEWGKDDSDNVRLASVILSLEVKLHLLHSYMNVKWIPLSSDAQAPLAQ

SEQ ID NO: 325 - protein, 518 aa, Artificial Sequence
  Description of Artificial Sequence: Synthetic polypeptide
QVQLVESGGGLVQAGASLRLSCAASERTFGHYAMGWFRQAPGKEREFVATISWKGGTTGYAHSVKGRFTISRDSAKNMVYLQMNSLKPEDTAVYYCAARNTMSGSMSSSAYPYWGQGTQVTVSSPPSFSEGSGGSRTPEKGFSDREPTRPPRPILQRQDDIVQEKRLSRGISHASSSIVSLARSHVSSNGGGGGSNEHPLEMPICAFQLPDLTVYNEDFRSFIERDLIEQSMLVALEQAGRLNWWVSVDPTSQRLLPLATTGDGNCLLHAASLGMWGFHDRDLMLRKALYALMEKGVEKEALKRRWRWQQTQQNKESGLVYTEDEWQKEWNELIKLASSEPRMHLGTNGANCGGVESSEEPVYESLEEFHVFVLAHVLRRPIVVVADTMLRDSGGEAFAPIPFGGIYLPLEVPASQCHRSPLVLAYDQAHFSALVSMEQKENTKEQAVIPLTDSEYKLLPLHFAVDPGKGWEWGKDDSDNVRLASVILSLEVKLHLLHSYMNVKWIPLSSDAQAPLAQ

SEQ ID NO: 326 - protein, 517 aa, Artificial Sequence
  Description of Artificial Sequence: Synthetic polypeptide
QVQLVESGGGLVQPGGSLRLSCAASGFSFSNFPMMWVRQAPGKGREWVADINQDGRNTYYADSVKGRFTISRDNAKTTVYLQMNNLNPEDTAVYYCQAIRTTTHFDSWGQGTQVTVSSGSSSSPPSFSEGSGGSRTPEKGFSDREPTRPPRPILQRQDDIVQEKRLSRGISHASSSIVSLARSHVSSNGGGGGSNEHPLEMPICAFQLPDLTVYNEDFRSFIERDLIEQSMLVALEQAGRLNWWVSVDPTSQRLLPLATTGDGNCLLHAASLGMWGFHDRDLMLRKALYALMEKGVEKEALKRRWRWQQTQQNKESGLVYTEDEWQKEWNELIKLASSEPRMHLGTNGANCGGVESSEEPVYESLEEFHVFVLAHVLRRPIVVVADTMLRDSGGEAFAPIPFGGIYLPLEVPASQCHRSPLVLAYDQAHFSALVSMEQKENTKEQAVIPLTDSEYKLLPLHFAVDPGKGWEWGKDDSDNVRLASVILSLEVKLHLLHSYMNVKWIPLSSDAQAPLAQ

SEQ ID NO: 327 - protein, 523 aa, Artificial Sequence
  Description of Artificial Sequence: Synthetic polypeptide
QLQLVESGGGLVQPGESLRLSCAASGFTFSNYRMYWVRMAPGKGLEWVSDIDRSGTYTYYADSVKGRFAISRDNAKNTVYLQMNSLKPEDTAVYYCAADRRLIVDLTPEVYDHWGQGTQVTVSSGSSSSPPSFSEGSGGSRTPEKGFSDREPTRPPRPILQRQDDIVQEKRLSRGISHASSSIVSLARSHVSSNGGGGGSNEHPLEMPICAFQLPDLTVYNEDFRSFIERDLIEQSMLVALEQAGRLNWWVSVDPTSQRLLPLATTGDGNCLLHAASLGMWGFHDRDLMLRKALYALMEKGVEKEALKRRWRWQQTQQNKESGLVYTEDEWQKEWNELIKLASSEPRMHLGTNGANCGGVESSEEPVYESLEEFHVFVLAHVLRRPIVVVADTMLRDSGGEAFAPIPFGGIYLPLEVPASQCHRSPLVLAYDQAHFSALVSMEQKENTKEQAVIPLTDSEYKLLPLHFAVDPGKGWEWGKDDSDNVRLASVILSLEVKLHLLHSYMNVKWIPLSSDAQAPLAQ

SEQ ID NO: 328 - protein, 525 aa, Artificial Sequence
  Description of Artificial Sequence: Synthetic polypeptide
QVQLVESGGGLVQPGGSLRLSCAASGFIFSSYQMAWVRQAPGKGLEWVADINTGGWNTYYADSVKGRFTISRDNAKNTLYLEMNSLKPEDTAVYYCAADRWMVAKIVGGDLDFDSWGQGTQVTVSSGSSSSPPSFSEGSGGSRTPEKGFSDREPTRPPRPILQRQDDIVQEKRLSRGISHASSSIVSLARSHVSSNGGGGGSNEHPLEMPICAFQLPDLTVYNEDFRSFIERDLIEQSMLVALEQAGRLNWWVSVDPTSQRLLPLATTGDGNCLLHAASLGMWGFHDRDLMLRKALYALMEKGVEKEALKRRWRWQQTQQNKESGLVYTEDEWQKEWNELIKLASSEPRMHLGTNGANCGGVESSEEPVYESLEEFHVFVLAHVLRRPIVVVADTMLRDSGGEAFAPIPFGGIYLPLEVPASQCHRSPLVLAYDQAHFSALVSMEQKENTKEQAVIPLTDSEYKLLPLHFAVDPGKGWEWGKDDSDNVRLASVILSLEVKLHLLHSYMNVKWIPLSSDAQAPLAQ

SEQ ID NO: 329 - protein, 518 aa, Artificial Sequence
  Description of Artificial Sequence: Synthetic polypeptide
QVQLVESGGGLVQPGGSLRLSCAASGFAFGSYDMSWVRQAPGQGPEWVSAITPGGGGTFYAYYSDSVKGRFAISRDNAKNTLTLQMNSLKPDDTAMYYCAKNFYGNGGRGHGTQVTVSSGSSSSPPSFSEGSGGSRTPEKGFSDREPTRPPRPILQRQDDIVQEKRLSRGISHASSSIVSLARSHVSSNGGGGGSNEHPLEMPICAFQLPDLTVYNEDFRSFIERDLIEQSMLVALEQAGRLNWWVSVDPTSQRLLPLATTGDGNCLLHAASLGMWGFHDRDLMLRKALYALMEKGVEKEALKRRWRWQQTQQNKESGLVYTEDEWQKEWNELIKLASSEPRMHLGTNGANCGGVESSEEPVYESLEEFHVFVLAHVLRRPIVVVADTMLRDSGGEAFAPIPFGGIYLPLEVPASQCHRSPLVLAYDQAHFSALVSMEQKENTKEQAVIPLTDSEYKLLPLHFAVDPGKGWEWGKDDSDNVRLASVILSLEVKLHLLHSYMNVKWIPLSSDAQAPLAQ

SEQ ID NO: 330 - protein, 516 aa, Artificial Sequence
  Description of Artificial Sequence: Synthetic polypeptide
QVQLVESGGGLVQPGGSLRLACAASGFTFGTHAMHWVRWAPGKGFEWVSTISSGGGGTRYADSVKGRFTISRDNAKNTVYLQMDNLKPEDTAVYYCNSPSNIANDNWGQGTQVTVSSGSSSSPPSFSEGSGGSRTPEKGFSDREPTRPPRPILQRQDDIVQEKRLSRGISHASSSIVSLARSHVSSNGGGGGSNEHPLEMPICAFQLPDLTVYNEDFRSFIERDLIEQSMLVALEQAGRLNWWVSVDPTSQRLLPLATTGDGNCLLHAASLGMWGFHDRDLMLRKALYALMEKGVEKEALKRRWRWQQTQQNKESGLVYTEDEWQKEWNELIKLASSEPRMHLGTNGANCGGVESSEEPVYESLEEFHVFVLAHVLRRPIVVVADTMLRDSGGEAFAPIPFGGIYLPLEVPASQCHRSPLVLAYDQAHFSALVSMEQKENTKEQAVIPLTDSEYKLLPLHFAVDPGKGWEWGKDDSDNVRLASVILSLEVKLHLLHSYMNVKWIPLSSDAQAPLAQ

SEQ ID NO: 331 - protein, 523 aa, Artificial Sequence
  Description of Artificial Sequence: Synthetic polypeptide
QVQLVESGGGLVQAGASLRLSCAASERTFGHYAMGWFRQAPGKEREFVATISWKGGTTGYAHSVKGRFTISRDSAKNMVYLQMNSLKPEDTAVYYCAARNTMSGSMSSSAYPYWGQGTQVTVSSGSSSSPPSFSEGSGGSRTPEKGFSDREPTRPPRPILQRQDDIVQEKRLSRGISHASSSIVSLARSHVSSNGGGGGSNEHPLEMPICAFQLPDLTVYNEDFRSFIERDLIEQSMLVALEQAGRLNWWVSVDPTSQRLLPLATTGDGNCLLHAASLGMWGFHDRDLMLRKALYALMEKGVEKEALKRRWRWQQTQQNKESGLVYTEDEWQKEWNELIKLASSEPRMHLGTNGANCGGVESSEEPVYESLEEFHVFVLAHVLRRPIVVVADTMLRDSGGEAFAPIPFGGIYLPLEVPASQCHRSPLVLAYDQAHFSALVSMEQKENTKEQAVIPLTDSEYKLLPLHFAVDPGKGWEWGKDDSDNVRLASVILSLEVKLHLLHSYMNVKWIPLSSDAQAPLAQ

SEQ ID NO: 332 - protein, 522 aa, Artificial Sequence
  Description of Artificial Sequence: Synthetic polypeptide
QVQLVESGGGLVQPGGSLRLSCAASGFSFSNFPMMWVRQAPGKGREWVADINQDGRNTYYADSVKGRFTISRDNAKTTVYLQMNNLNPEDTAVYYCQAIRTTTHFDSWGQGTQVTVSSGSSSSGSSSSPPSFSEGSGGSRTPEKGFSDREPTRPPRPILQRQDDIVQEKRLSRGISHASSSIVSLARSHVSSNGGGGGSNEHPLEMPICAFQLPDLTVYNEDFRSFIERDLIEQSMLVALEQAGRLNWWVSVDPTSQRLLPLATTGDGNCLLHAASLGMWGFHDRDLMLRKALYALMEKGVEKEALKRRWRWQQTQQNKESGLVYTEDEWQKEWNELIKLASSEPRMHLGTNGANCGGVESSEEPVYESLEEFHVFVLAHVLRRPIVVVADTMLRDSGGEAFAPIPFGGIYLPLEVPASQCHRSPLVLAYDQAHFSALVSMEQKENTKEQAVIPLTDSEYKLLPLHFAVDPGKGWEWGKDDSDNVRLASVILSLEVKLHLLHSYMNVKWIPLSSDAQAPLAQ

SEQ ID NO: 333 - protein, 528 aa, Artificial Sequence
  Description of Artificial Sequence: Synthetic polypeptide
QLQLVESGGGLVQPGESLRLSCAASGFTFSNYRMYWVRMAPGKGLEWVSDIDRSGTYTYYADSVKGRFAISRDNAKNTVYLQMNSLKPEDTAVYYCAADRRLIVDLTPEVYDHWGQGTQVTVSSGSSSSGSSSSPPSFSEGSGGSRTPEKGFSDREPTRPPRPILQRQDDIVQEKRLSRGISHASSSIVSLARSHVSSNGGGGGSNEHPLEMPICAFQLPDLTVYNEDFRSFIERDLIEQSMLVALEQAGRLNWWVSVDPTSQRLLPLATTGDGNCLLHAASLGMWGFHDRDLMLRKALYALMEKGVEKEALKRRWRWQQTQQNKESGLVYTEDEWQKEWNELIKLASSEPRMHLGTNGANCGGVESSEEPVYESLEEFHVFVLAHVLRRPIVVVADTMLRDSGGEAFAPIPFGGIYLPLEVPASQCHRSPLVLAYDQAHFSALVSMEQKENTKEQAVIPLTDSEYKLLPLHFAVDPGKGWEWGKDDSDNVRLASVILSLEVKLHLLHSYMNVKWIPLSSDAQAPLAQ

SEQ ID NO: 334 - protein, 530 aa, Artificial Sequence
  Description of Artificial Sequence: Synthetic polypeptide
QVQLVESGGGLVQPGGSLRLSCAASGFIFSSYQMAWVRQAPGKGLEWVADINTGGWNTYYADSVKGRFTISRDNAKNTLYLEMNSLKPEDTAVYYCAADRWMVAKIVGGDLDFDSWGQGTQVTVSSGSSSSGSSSSPPSFSEGSGGSRTPEKGFSDREPTRPPRPILQRQDDIVQEKRLSRGISHASSSIVSLARSHVSSNGGGGGSNEHPLEMPICAFQLPDLTVYNEDFRSFIERDLIEQSMLVALEQAGRLNWWVSVDPTSQRLLPLATTGDGNCLLHAASLGMWGFHDRDLMLRKALYALMEKGVEKEALKRRWRWQQTQQNKESGLVYTEDEWQKEWNELIKLASSEPRMHLGTNGANCGGVESSEEPVYESLEEFHVFVLAHVLRRPIVVVADTMLRDSGGEAFAPIPFGGIYLPLEVPASQCHRSPLVLAYDQAHFSALVSMEQKENTKEQAVIPLTDSEYKLLPLHFAVDPGKGWEWGKDDSDNVRLASVILSLEVKLHLLHSYMNVKWIPLSSDAQAPLAQ

SEQ ID NO: 335 - protein, 523 aa, Artificial Sequence
  Description of Artificial Sequence: Synthetic polypeptide
QVQLVESGGGLVQPGGSLRLSCAASGFAFGSYDMSWVRQAPGQGPEWVSAITPGGGGTFYAYYSDSVKGRFAISRDNAKNTLTLQMNSLKPDDTAMYYCAKNFYGNGGRGHGTQVTVSSGSSSSGSSSSPPSFSEGSGGSRTPEKGFSDREPTRPPRPILQRQDDIVQEKRLSRGISHASSSIVSLARSHVSSNGGGGGSNEHPLEMPICAFQLPDLTVYNEDFRSFIERDLIEQSMLVALEQAGRLNWWVSVDPTSQRLLPLATTGDGNCLLHAASLGMWGFHDRDLMLRKALYALMEKGVEKEALKRRWRWQQTQQNKESGLVYTEDEWQKEWNELIKLASSEPRMHLGTNGANCGGVESSEEPVYESLEEFHVFVLAHVLRRPIVVVADTMLRDSGGEAFAPIPFGGIYLPLEVPASQCHRSPLVLAYDQAHFSALVSMEQKENTKEQAVIPLTDSEYKLLPLHFAVDPGKGWEWGKDDSDNVRLASVILSLEVKLHLLHSYMNVKWIPLSSDAQAPLAQ

SEQ ID NO: 336 - protein, 521 aa, Artificial Sequence
  Description of Artificial Sequence: Synthetic polypeptide
QVQLVESGGGLVQPGGSLRLACAASGFTFGTHAMHWVRWAPGKGFEWVSTISSGGGGTRYADSVKGRFTISRDNAKNTVYLQMDNLKPEDTAVYYCNSPSNIANDNWGQGTQVTVSSGSSSSGSSSSPPSFSEGSGGSRTPEKGFSDREPTRPPRPILQRQDDIVQEKRLSRGISHASSSIVSLARSHVSSNGGGGGSNEHPLEMPICAFQLPDLTVYNEDFRSFIERDLIEQSMLVALEQAGRLNWWVSVDPTSQRLLPLATTGDGNCLLHAASLGMWGFHDRDLMLRKALYALMEKGVEKEALKRRWRWQQTQQNKESGLVYTEDEWQKEWNELIKLASSEPRMHLGTNGANCGGVESSEEPVYESLEEFHVFVLAHVLRRPIVVVADTMLRDSGGEAFAPIPFGGIYLPLEVPASQCHRSPLVLAYDQAHFSALVSMEQKENTKEQAVIPLTDSEYKLLPLHFAVDPGKGWEWGKDDSDNVRLASVILSLEVKLHLLHSYMNVKWIPLSSDAQAPLAQ

SEQ ID NO: 337 - protein, 528 aa, Artificial Sequence
  Description of Artificial Sequence: Synthetic polypeptide
QVQLVESGGGLVQAGASLRLSCAASERTFGHYAMGWFRQAPGKEREFVATISWKGGTTGYAHSVKGRFTISRDSAKNMVYLQMNSLKPEDTAVYYCAARNTMSGSMSSSAYPYWGQGTQVTVSSGSSSSGSSSSPPSFSEGSGGSRTPEKGFSDREPTRPPRPILQRQDDIVQEKRLSRGISHASSSIVSLARSHVSSNGGGGGSNEHPLEMPICAFQLPDLTVYNEDFRSFIERDLIEQSMLVALEQAGRLNWWVSVDPTSQRLLPLATTGDGNCLLHAASLGMWGFHDRDLMLRKALYALMEKGVEKEALKRRWRWQQTQQNKESGLVYTEDEWQKEWNELIKLASSEPRMHLGTNGANCGGVESSEEPVYESLEEFHVFVLAHVLRRPIVVVADTMLRDSGGEAFAPIPFGGIYLPLEVPASQCHRSPLVLAYDQAHFSALVSMEQKENTKEQAVIPLTDSEYKLLPLHFAVDPGKGWEWGKDDSDNVRLASVILSLEVKLHLLHSYMNVKWIPLSSDAQAPLAQ

SEQ ID NO: 338 - protein, 527 aa, Artificial Sequence
  Description of Artificial Sequence: Synthetic polypeptide
QVQLVESGGGLVQPGGSLRLSCAASGFSFSNFPMMWVRQAPGKGREWVADINQDGRNTYYADSVKGRFTISRDNAKTTVYLQMNNLNPEDTAVYYCQAIRTTTHFDSWGQGTQVTVSSGSSSSGSSSSGSSSSPPSFSEGSGGSRTPEKGFSDREPTRPPRPILQRQDDIVQEKRLSRGISHASSSIVSLARSHVSSNGGGGGSNEHPLEMPICAFQLPDLTVYNEDFRSFIERDLIEQSMLVALEQAGRLNWWVSVDPTSQRLLPLATTGDGNCLLHAASLGMWGFHDRDLMLRKALYALMEKGVEKEALKRRWRWQQTQQNKESGLVYTEDEWQKEWNELIKLASSEPRMHLGTNGANCGGVESSEEPVYESLEEFHVFVLAHVLRRPIVVVADTMLRDSGGEAFAPIPFGGIYLPLEVPASQCHRSPLVLAYDQAHFSALVSMEQKENTKEQAVIPLTDSEYKLLPLHFAVDPGKGWEWGKDDSDNVRLASVILSLEVKLHLLHSYMNVKWIPLSSDAQAPLAQ

SEQ ID NO: 339 - protein, 533 aa, Artificial Sequence
  Description of Artificial Sequence: Synthetic polypeptide
QLQLVESGGGLVQPGESLRLSCAASGFTFSNYRMYWVRMAPGKGLEWVSDIDRSGTYTYYADSVKGRFAISRDNAKNTVYLQMNSLKPEDTAVYYCAADRRLIVDLTPEVYDHWGQGTQVTVSSGSSSSGSSSSGSSSSPPSFSEGSGGSRTPEKGFSDREPTRPPRPILQRQDDIVQEKRLSRGISHASSSIVSLARSHVSSNGGGGGSNEHPLEMPICAFQLPDLTVYNEDFRSFIERDLIEQSMLVALEQAGRLNWWVSVDPTSQRLLPLATTGDGNCLLHAASLGMWGFHDRDLMLRKALYALMEKGVEKEALKRRWRWQQTQQNKESGLVYTEDEWQKEWNELIKLASSEPRMHLGTNGANCGGVESSEEPVYESLEEFHVFVLAHVLRRPIVVVADTMLRDSGGEAFAPIPFGGIYLPLEVPASQCHRSPLVLAYDQAHFSALVSMEQKENTKEQAVIPLTDSEYKLLPLHFAVDPGKGWEWGKDDSDNVRLASVILSLEVKLHLLHSYMNVKWIPLSSDAQAPLAQ

SEQ ID NO: 340 - protein, 535 aa, Artificial Sequence
  Description of Artificial Sequence: Synthetic polypeptide
QVQLVESGGGLVQPGGSLRLSCAASGFIFSSYQMAWVRQAPGKGLEWVADINTGGWNTYYADSVKGRFTISRDNAKNTLYLEMNSLKPEDTAVYYCAADRWMVAKIVGGDLDFDSWGQGTQVTVSSGSSSSGSSSSGSSSSPPSFSEGSGGSRTPEKGFSDREPTRPPRPILQRQDDIVQEKRLSRGISHASSSIVSLARSHVSSNGGGGGSNEHPLEMPICAFQLPDLTVYNEDFRSFIERDLIEQSMLVALEQAGRLNWWVSVDPTSQRLLPLATTGDGNCLLHAASLGMWGFHDRDLMLRKALYALMEKGVEKEALKRRWRWQQTQQNKESGLVYTEDEWQKEWNELIKLASSEPRMHLGTNGANCGGVESSEEPVYESLEEFHVFVLAHVLRRPIVVVADTMLRDSGGEAFAPIPFGGIYLPLEVPASQCHRSPLVLAYDQAHFSALVSMEQKENTKEQAVIPLTDSEYKLLPLHFAVDPGKGWEWGKDDSDNVRLASVILSLEVKLHLLHSYMNVKWIPLSSDAQAPLAQ

SEQ ID NO: 341 - protein, 528 aa, Artificial Sequence
  Description of Artificial Sequence: Synthetic polypeptide
QVQLVESGGGLVQPGGSLRLSCAASGFAFGSYDMSWVRQAPGQGPEWVSAITPGGGGTFYAYYSDSVKGRFAISRDNAKNTLTLQMNSLKPDDTAMYYCAKNFYGNGGRGHGTQVTVSSGSSSSGSSSSGSSSSPPSFSEGSGGSRTPEKGFSDREPTRPPRPILQRQDDIVQEKRLSRGISHASSSIVSLARSHVSSNGGGGGSNEHPLEMPICAFQLPDLTVYNEDFRSFIERDLIEQSMLVALEQAGRLNWWVSVDPTSQRLLPLATTGDGNCLLHAASLGMWGFHDRDLMLRKALYALMEKGVEKEALKRRWRWQQTQQNKESGLVYTEDEWQKEWNELIKLASSEPRMHLGTNGANCGGVESSEEPVYESLEEFHVFVLAHVLRRPIVVVADTMLRDSGGEAFAPIPFGGIYLPLEVPASQCHRSPLVLAYDQAHFSALVSMEQKENTKEQAVIPLTDSEYKLLPLHFAVDPGKGWEWGKDDSDNVRLASVILSLEVKLHLLHSYMNVKWIPLSSDAQAPLAQ

SEQ ID NO: 342 - protein, 526 aa, Artificial Sequence
  Description of Artificial Sequence: Synthetic polypeptide
QVQLVESGGGLVQPGGSLRLACAASGFTFGTHAMHWVRWAPGKGFEWVSTISSGGGGTRYADSVKGRFTISRDNAKNTVYLQMDNLKPEDTAVYYCNSPSNIANDNWGQGTQVTVSSGSSSSGSSSSGSSSSPPSFSEGSGGSRTPEKGFSDREPTRPPRPILQRQDDIVQEKRLSRGISHASSSIVSLARSHVSSNGGGGGSNEHPLEMPICAFQLPDLTVYNEDFRSFIERDLIEQSMLVALEQAGRLNWWVSVDPTSQRLLPLATTGDGNCLLHAASLGMWGFHDRDLMLRKALYALMEKGVEKEALKRRWRWQQTQQNKESGLVYTEDEWQKEWNELIKLASSEPRMHLGTNGANCGGVESSEEPVYESLEEFHVFVLAHVLRRPIVVVADTMLRDSGGEAFAPIPFGGIYLPLEVPASQCHRSPLVLAYDQAHFSALVSMEQKENTKEQAVIPLTDSEYKLLPLHFAVDPGKGWEWGKDDSDNVRLASVILSLEVKLHLLHSYMNVKWIPLSSDAQAPLAQ

SEQ ID NO: 343 - protein, 533 aa, Artificial Sequence
  Description of Artificial Sequence: Synthetic polypeptide
QVQLVESGGGLVQAGASLRLSCAASERTFGHYAMGWFRQAPGKEREFVATISWKGGTTGYAHSVKGRFTISRDSAKNMVYLQMNSLKPEDTAVYYCAARNTMSGSMSSSAYPYWGQGTQVTVSSGSSSSGSSSSGSSSSPPSFSEGSGGSRTPEKGFSDREPTRPPRPILQRQDDIVQEKRLSRGISHASSSIVSLARSHVSSNGGGGGSNEHPLEMPICAFQLPDLTVYNEDFRSFIERDLIEQSMLVALEQAGRLNWWVSVDPTSQRLLPLATTGDGNCLLHAASLGMWGFHDRDLMLRKALYALMEKGVEKEALKRRWRWQQTQQNKESGLVYTEDEWQKEWNELIKLASSEPRMHLGTNGANCGGVESSEEPVYESLEEFHVFVLAHVLRRPIVVVADTMLRDSGGEAFAPIPFGGIYLPLEVPASQCHRSPLVLAYDQAHFSALVSMEQKENTKEQAVIPLTDSEYKLLPLHFAVDPGKGWEWGKDDSDNVRLASVILSLEVKLHLLHSYMNVKWIPLSSDAQAPLAQ

SEQ ID NO: 344 - protein, 650 aa, Artificial Sequence
  Description of Artificial Sequence: Synthetic polypeptide
QVQLVESGGGLVQPGGSLRLSCAASGFSFSNFPMMWVRQAPGKGREWVADINQDGRNTYYADSVKGRFTISRDNAKTTVYLQMNNLNPEDTAVYYCQAIRTTTHFDSWGQGTQVTVSSGGGGSGGGGSGGGGSGGGGSQVQLVESGGGLVQPGGSLRLSCAASGFSFSNFPMMWVRQAPGKGREWVADINQDGRNTYYADSVKGRFTISRDNAKTTVYLQMNNLNPEDTAVYYCQAIRTTTHFDSWGQGTQVTVSSPPSFSEGSGGSRTPEKGFSDREPTRPPRPILQRQDDIVQEKRLSRGISHASSSIVSLARSHVSSNGGGGGSNEHPLEMPICAFQLPDLTVYNEDFRSFIERDLIEQSMLVALEQAGRLNWWVSVDPTSQRLLPLATTGDGNCLLHAASLGMWGFHDRDLMLRKALYALMEKGVEKEALKRRWRWQQTQQNKESGLVYTEDEWQKEWNELIKLASSEPRMHLGTNGANCGGVESSEEPVYESLEEFHVFVLAHVLRRPIVVVADTMLRDSGGEAFAPIPFGGIYLPLEVPASQCHRSPLVLAYDQAHFSALVSMEQKENTKEQAVIPLTDSEYKLLPLHFAVDPGKGWEWGKDDSDNVRLASVILSLEVKLHLLHSYMNVKWIPLSSDAQAPLAQ

SEQ ID NO: 345 - protein, 662 aa, Artificial Sequence
  Description of Artificial Sequence: Synthetic polypeptide
QLQLVESGGGLVQPGESLRLSCAASGFTFSNYRMYWVRMAPGKGLEWVSDIDRSGTYTYYADSVKGRFAISRDNAKNTVYLQMNSLKPEDTAVYYCAADRRLIVDLTPEVYDHWGQGTQVTVSSGGGGSGGGGSGGGGSGGGGSQLQLVESGGGLVQPGESLRLSCAASGFTFSNYRMYWVRMAPGKGLEWVSDIDRSGTYTYYADSVKGRFAISRDNAKNTVYLQMNSLKPEDTAVYYCAADRRLIVDLTPEVYDHWGQGTQVTVSSPPSFSEGSGGSRTPEKGFSDREPTRPPRPILQRQDDIVQEKRLSRGISHASSSIVSLARSHVSSNGGGGGSNEHPLEMPICAFQLPDLTVYNEDFRSFIERDLIEQSMLVALEQAGRLNWWVSVDPTSQRLLPLATTGDGNCLLHAASLGMWGFHDRDLMLRKALYALMEKGVEKEALKRRWRWQQTQQNKESGLVYTEDEWQKEWNELIKLASSEPRMHLGTNGANCGGVESSEEPVYESLEEFHVFVLAHVLRRPIVVVADTMLRDSGGEAFAPIPFGGIYLPLEVPASQCHRSPLVLAYDQAHFSALVSMEQKENTKEQAVIPLTDSEYKLLPLHFAVDPGKGWEWGKDDSDNVRLASVILSLEVKLHLLHSYMNVKWIPLSSDAQAPLAQ

SEQ ID NO: 346 - protein, 666 aa, Artificial Sequence
  Description of Artificial Sequence: Synthetic polypeptide
QVQLVESGGGLVQPGGSLRLSCAASGFIFSSYQMAWVRQAPGKGLEWVADINTGGWNTYYADSVKGRFTISRDNAKNTLYLEMNSLKPEDTAVYYCAADRWMVAKIVGGDLDFDSWGQGTQVTVSSGGGGSGGGGSGGGGSGGGGSQVQLVESGGGLVQPGGSLRLSCAASGFIFSSYQMAWVRQAPGKGLEWVADINTGGWNTYYADSVKGRFTISRDNAKNTLYLEMNSLKPEDTAVYYCAADRWMVAKIVGGDLDFDSWGQGTQVTVSSPPSFSEGSGGSRTPEKGFSDREPTRPPRPILQRQDDIVQEKRLSRGISHASSSIVSLARSHVSSNGGGGGSNEHPLEMPICAFQLPDLTVYNEDFRSFIERDLIEQSMLVALEQAGRLNWWVSVDPTSQRLLPLATTGDGNCLLHAASLGMWGFHDRDLMLRKALYALMEKGVEKEALKRRWRWQQTQQNKESGLVYTEDEWQKEWNELIKLASSEPRMHLGTNGANCGGVESSEEPVYESLEEFHVFVLAHVLRRPIVVVADTMLRDSGGEAFAPIPFGGIYLPLEVPASQCHRSPLVLAYDQAHFSALVSMEQKENTKEQAVIPLTDSEYKLLPLHFAVDPGKGWEWGKDDSDNVRLASVILSLEVKLHLLHSYMNVKWIPLSSDAQAPLAQ

SEQ ID NO: 347 - protein, 652 aa, Artificial Sequence
  Description of Artificial Sequence: Synthetic polypeptide
QVQLVESGGGLVQPGGSLRLSCAASGFAFGSYDMSWVRQAPGQGPEWVSAITPGGGGTFYAYYSDSVKGRFAISRDNAKNTLTLQMNSLKPDDTAMYYCAKNFYGNGGRGHGTQVTVSSGGGGSGGGGSGGGGSGGGGSQVQLVESGGGLVQPGGSLRLSCAASGFAFGSYDMSWVRQAPGQGPEWVSAITPGGGGTFYAYYSDSVKGRFAISRDNAKNTLTLQMNSLKPDDTAMYYCAKNFYGNGGRGHGTQVTVSSPPSFSEGSGGSRTPEKGFSDREPTRPPRPILQRQDDIVQEKRLSRGISHASSSIVSLARSHVSSNGGGGGSNEHPLEMPICAFQLPDLTVYNEDFRSFIERDLIEQSMLVALEQAGRLNWWVSVDPTSQRLLPLATTGDGNCLLHAASLGMWGFHDRDLMLRKALYALMEKGVEKEALKRRWRWQQTQQNKESGLVYTEDEWQKEWNELIKLASSEPRMHLGTNGANCGGVESSEEPVYESLEEFHVFVLAHVLRRPIVVVADTMLRDSGGEAFAPIPFGGIYLPLEVPASQCHRSPLVLAYDQAHFSALVSMEQKENTKEQAVIPLTDSEYKLLPLHFAVDPGKGWEWGKDDSDNVRLASVILSLEVKLHLLHSYMNVKWIPLSSDAQAPLAQ

SEQ ID NO: 348 - protein, 648 aa, Artificial Sequence
  Description of Artificial Sequence: Synthetic polypeptide
QVQLVESGGGLVQPGGSLRLACAASGFTFGTHAMHWVRWAPGKGFEWVSTISSGGGGTRYADSVKGRFTISRDNAKNTVYLQMDNLKPEDTAVYYCNSPSNIANDNWGQGTQVTVSSGGGGSGGGGSGGGGSGGGGSQVQLVESGGGLVQPGGSLRLACAASGFTFGTHAMHWVRWAPGKGFEWVSTISSGGGGTRYADSVKGRFTISRDNAKNTVYLQMDNLKPEDTAVYYCNSPSNIANDNWGQGTQVTVSSPPSFSEGSGGSRTPEKGFSDREPTRPPRPILQRQDDIVQEKRLSRGISHASSSIVSLARSHVSSNGGGGGSNEHPLEMPICAFQLPDLTVYNEDFRSFIERDLIEQSMLVALEQAGRLNWWVSVDPTSQRLLPLATTGDGNCLLHAASLGMWGFHDRDLMLRKALYALMEKGVEKEALKRRWRWQQTQQNKESGLVYTEDEWQKEWNELIKLASSEPRMHLGTNGANCGGVESSEEPVYESLEEFHVFVLAHVLRRPIVVVADTMLRDSGGEAFAPIPFGGIYLPLEVPASQCHRSPLVLAYDQAHFSALVSMEQKENTKEQAVIPLTDSEYKLLPLHFAVDPGKGWEWGKDDSDNVRLASVILSLEVKLHLLHSYMNVKWIPLSSDAQAPLAQ

SEQ ID NO: 349 - protein, 662 aa, Artificial Sequence
  Description of Artificial Sequence: Synthetic polypeptide
QVQLVESGGGLVQAGASLRLSCAASERTFGHYAMGWFRQAPGKEREFVATISWKGGTTGYAHSVKGRFTISRDSAKNMVYLQMNSLKPEDTAVYYCAARNTMSGSMSSSAYPYWGQGTQVTVSSGGGGSGGGGSGGGGSGGGGSQVQLVESGGGLVQAGASLRLSCAASERTFGHYAMGWFRQAPGKEREFVATISWKGGTTGYAHSVKGRFTISRDSAKNMVYLQMNSLKPEDTAVYYCAARNTMSGSMSSSAYPYWGQGTQVTVSSPPSFSEGSGGSRTPEKGFSDREPTRPPRPILQRQDDIVQEKRLSRGISHASSSIVSLARSHVSSNGGGGGSNEHPLEMPICAFQLPDLTVYNEDFRSFIERDLIEQSMLVALEQAGRLNWWVSVDPTSQRLLPLATTGDGNCLLHAASLGMWGFHDRDLMLRKALYALMEKGVEKEALKRRWRWQQTQQNKESGLVYTEDEWQKEWNELIKLASSEPRMHLGTNGANCGGVESSEEPVYESLEEFHVFVLAHVLRRPIVVVADTMLRDSGGEAFAPIPFGGIYLPLEVPASQCHRSPLVLAYDQAHFSALVSMEQKENTKEQAVIPLTDSEYKLLPLHFAVDPGKGWEWGKDDSDNVRLASVILSLEVKLHLLHSYMNVKWIPLSSDAQAPLAQ

SEQ ID NO: 350 - protein, 655 aa, Artificial Sequence
  Description of Artificial Sequence: Synthetic polypeptide
QVQLVESGGGLVQPGGSLRLSCAASGFSFSNFPMMWVRQAPGKGREWVADINQDGRNTYYADSVKGRFTISRDNAKTTVYLQMNNLNPEDTAVYYCQAIRTTTHFDSWGQGTQVTVSSGGGGSGGGGSGGGGSGGGGSQVQLVESGGGLVQPGGSLRLSCAASGFSFSNFPMMWVRQAPGKGREWVADINQDGRNTYYADSVKGRFTISRDNAKTTVYLQMNNLNPEDTAVYYCQAIRTTTHFDSWGQGTQVTVSSGSSSSPPSFSEGSGGSRTPEKGFSDREPTRPPRPILQRQDDIVQEKRLSRGISHASSSIVSLARSHVSSNGGGGGSNEHPLEMPICAFQLPDLTVYNEDFRSFIERDLIEQSMLVALEQAGRLNWWVSVDPTSQRLLPLATTGDGNCLLHAASLGMWGFHDRDLMLRKALYALMEKGVEKEALKRRWRWQQTQQNKESGLVYTEDEWQKEWNELIKLASSEPRMHLGTNGANCGGVESSEEPVYESLEEFHVFVLAHVLRRPIVVVADTMLRDSGGEAFAPIPFGGIYLPLEVPASQCHRSPLVLAYDQAHFSALVSMEQKENTKEQAVIPLTDSEYKLLPLHFAVDPGKGWEWGKDDSDNVRLASVILSLEVKLHLLHSYMNVKWIPLSSDAQAPLAQ

SEQ ID NO: 351 - protein, 667 aa, Artificial Sequence
  Description of Artificial Sequence: Synthetic polypeptide
QLQLVESGGGLVQPGESLRLSCAASGFTFSNYRMYWVRMAPGKGLEWVSDIDRSGTYTYYADSVKGRFAISRDNAKNTVYLQMNSLKPEDTAVYYCAADRRLIVDLTPEVYDHWGQGTQVTVSSGGGGSGGGGSGGGGSGGGGSQLQLVESGGGLVQPGESLRLSCAASGFTFSNYRMYWVRMAPGKGLEWVSDIDRSGTYTYYADSVKGRFAISRDNAKNTVYLQMNSLKPEDTAVYYCAADRRLIVDLTPEVYDHWGQGTQVTVSSGSSSSPPSFSEGSGGSRTPEKGFSDREPTRPPRPILQRQDDIVQEKRLSRGISHASSSIVSLARSHVSSNGGGGGSNEHPLEMPICAFQLPDLTVYNEDFRSFIERDLIEQSMLVALEQAGRLNWWVSVDPTSQRLLPLATTGDGNCLLHAASLGMWGFHDRDLMLRKALYALMEKGVEKEALKRRWRWQQTQQNKESGLVYTEDEWQKEWNELIKLASSEPRMHLGTNGANCGGVESSEEPVYESLEEFHVFVLAHVLRRPIVVVADTMLRDSGGEAFAPIPFGGIYLPLEVPASQCHRSPLVLAYDQAHFSALVSMEQKENTKEQAVIPLTDSEYKLLPLHFAVDPGKGWEWGKDDSDNVRLASVILSLEVKLHLLHSYMNVKWIPLSSDAQAPLAQ

SEQ ID NO: 352 - protein, 671 aa, Artificial Sequence
  Description of Artificial Sequence: Synthetic polypeptide
QVQLVESGGGLVQPGGSLRLSCAASGFIFSSYQMAWVRQAPGKGLEWVADINTGGWNTYYADSVKGRFTISRDNAKNTLYLEMNSLKPEDTAVYYCAADRWMVAKIVGGDLDFDSWGQGTQVTVSSGGGGSGGGGSGGGGSGGGGSQVQLVESGGGLVQPGGSLRLSCAASGFIFSSYQMAWVRQAPGKGLEWVADINTGGWNTYYADSVKGRFTISRDNAKNTLYLEMNSLKPEDTAVYYCAADRWMVAKIVGGDLDFDSWGQGTQVTVSSGSSSSPPSFSEGSGGSRTPEKGFSDREPTRPPRPILQRQDDIVQEKRLSRGISHASSSIVSLARSHVSSNGGGGGSNEHPLEMPICAFQLPDLTVYNEDFRSFIERDLIEQSMLVALEQAGRLNWWVSVDPTSQRLLPLATTGDGNCLLHAASLGMWGFHDRDLMLRKALYALMEKGVEKEALKRRWRWQQTQQNKESGLVYTEDEWQKEWNELIKLASSEPRMHLGTNGANCGGVESSEEPVYESLEEFHVFVLAHVLRRPIVVVADTMLRDSGGEAFAPIPFGGIYLPLEVPASQCHRSPLVLAYDQAHFSALVSMEQKENTKEQAVIPLTDSEYKLLPLHFAVDPGKGWEWGKDDSDNVRLASVILSLEVKLHLLHSYMNVKWIPLSSDAQAPLAQ

SEQ ID NO: 353 - protein, 657 aa, Artificial Sequence
  Description of Artificial Sequence: Synthetic polypeptide
QVQLVESGGGLVQPGGSLRLSCAASGFAFGSYDMSWVRQAPGQGPEWVSAITPGGGGTFYAYYSDSVKGRFAISRDNAKNTLTLQMNSLKPDDTAMYYCAKNFYGNGGRGHGTQVTVSSGGGGSGGGGSGGGGSGGGGSQVQLVESGGGLVQPGGSLRLSCAASGFAFGSYDMSWVRQAPGQGPEWVSAITPGGGGTFYAYYSDSVKGRFAISRDNAKNTLTLQMNSLKPDDTAMYYCAKNFYGNGGRGHGTQVTVSSGSSSSPPSFSEGSGGSRTPEKGFSDREPTRPPRPILQRQDDIVQEKRLSRGISHASSSIVSLARSHVSSNGGGGGSNEHPLEMPICAFQLPDLTVYNEDFRSFIERDLIEQSMLVALEQAGRLNWWVSVDPTSQRLLPLATTGDGNCLLHAASLGMWGFHDRDLMLRKALYALMEKGVEKEALKRRWRWQQTQQNKESGLVYTEDEWQKEWNELIKLASSEPRMHLGTNGANCGGVESSEEPVYESLEEFHVFVLAHVLRRPIVVVADTMLRDSGGEAFAPIPFGGIYLPLEVPASQCHRSPLVLAYDQAHFSALVSMEQKENTKEQAVIPLTDSEYKLLPLHFAVDPGKGWEWGKDDSDNVRLASVILSLEVKLHLLHSYMNVKWIPLSSDAQAPLAQ

SEQ ID NO: 354 - protein, 653 aa, Artificial Sequence
  Description of Artificial Sequence: Synthetic polypeptide
QVQLVESGGGLVQPGGSLRLACAASGFTFGTHAMHWVRWAPGKGFEWVSTISSGGGGTRYADSVKGRFTISRDNAKNTVYLQMDNLKPEDTAVYYCNSPSNIANDNWGQGTQVTVSSGGGGSGGGGSGGGGSGGGGSQVQLVESGGGLVQPGGSLRLACAASGFTFGTHAMHWVRWAPGKGFEWVSTISSGGGGTRYADSVKGRFTISRDNAKNTVYLQMDNLKPEDTAVYYCNSPSNIANDNWGQGTQVTVSSGSSSSPPSFSEGSGGSRTPEKGFSDREPTRPPRPILQRQDDIVQEKRLSRGISHASSSIVSLARSHVSSNGGGGGSNEHPLEMPICAFQLPDLTVYNEDFRSFIERDLIEQSMLVALEQAGRLNWWVSVDPTSQRLLPLATTGDGNCLLHAASLGMWGFHDRDLMLRKALYALMEKGVEKEALKRRWRWQQTQQNKESGLVYTEDEWQKEWNELIKLASSEPRMHLGTNGANCGGVESSEEPVYESLEEFHVFVLAHVLRRPIVVVADTMLRDSGGEAFAPIPFGGIYLPLEVPASQCHRSPLVLAYDQAHFSALVSMEQKENTKEQAVIPLTDSEYKLLPLHFAVDPGKGWEWGKDDSDNVRLASVILSLEVKLHLLHSYMNVKWIPLSSDAQAPLAQ

SEQ ID NO: 355 - protein, 667 aa, Artificial Sequence
  Description of Artificial Sequence: Synthetic polypeptide
QVQLVESGGGLVQAGASLRLSCAASERTFGHYAMGWFRQAPGKEREFVATISWKGGTTGYAHSVKGRFTISRDSAKNMVYLQMNSLKPEDTAVYYCAARNTMSGSMSSSAYPYWGQGTQVTVSSGGGGSGGGGSGGGGSGGGGSQVQLVESGGGLVQAGASLRLSCAASERTFGHYAMGWFRQAPGKEREFVATISWKGGTTGYAHSVKGRFTISRDSAKNMVYLQMNSLKPEDTAVYYCAARNTMSGSMSSSAYPYWGQGTQVTVSSGSSSSPPSFSEGSGGSRTPEKGFSDREPTRPPRPILQRQDDIVQEKRLSRGISHASSSIVSLARSHVSSNGGGGGSNEHPLEMPICAFQLPDLTVYNEDFRSFIERDLIEQSMLVALEQAGRLNWWVSVDPTSQRLLPLATTGDGNCLLHAASLGMWGFHDRDLMLRKALYALMEKGVEKEALKRRWRWQQTQQNKESGLVYTEDEWQKEWNELIKLASSEPRMHLGTNGANCGGVESSEEPVYESLEEFHVFVLAHVLRRPIVVVADTMLRDSGGEAFAPIPFGGIYLPLEVPASQCHRSPLVLAYDQAHFSALVSMEQKENTKEQAVIPLTDSEYKLLPLHFAVDPGKGWEWGKDDSDNVRLASVILSLEVKLHLLHSYMNVKWIPLSSDAQAPLAQ

SEQ ID NO: 356 - protein, 660 aa, Artificial Sequence
  Description of Artificial Sequence: Synthetic polypeptide
QVQLVESGGGLVQPGGSLRLSCAASGFSFSNFPMMWVRQAPGKGREWVADINQDGRNTYYADSVKGRFTISRDNAKTTVYLQMNNLNPEDTAVYYCQAIRTTTHFDSWGQGTQVTVSSGGGGSGGGGSGGGGSGGGGSQVQLVESGGGLVQPGGSLRLSCAASGFSFSNFPMMWVRQAPGKGREWVADINQDGRNTYYADSVKGRFTISRDNAKTTVYLQMNNLNPEDTAVYYCQAIRTTTHFDSWGQGTQVTVSSGSSSSGSSSSPPSFSEGSGGSRTPEKGFSDREPTRPPRPILQRQDDIVQEKRLSRGISHASSSIVSLARSHVSSNGGGGGSNEHPLEMPICAFQLPDLTVYNEDFRSFIERDLIEQSMLVALEQAGRLNWWVSVDPTSQRLLPLATTGDGNCLLHAASLGMWGFHDRDLMLRKALYALMEKGVEKEALKRRWRWQQTQQNKESGLVYTEDEWQKEWNELIKLASSEPRMHLGTNGANCGGVESSEEPVYESLEEFHVFVLAHVLRRPIVVVADTMLRDSGGEAFAPIPFGGIYLPLEVPASQCHRSPLVLAYDQAHFSALVSMEQKENTKEQAVIPLTDSEYKLLPLHFAVDPGKGWEWGKDDSDNVRLASVILSLEVKLHLLHSYMNVKWIPLSSDAQAPLAQ

SEQ ID NO: 357 - protein, 672 aa, Artificial Sequence
  Description of Artificial Sequence: Synthetic polypeptide
QLQLVESGGGLVQPGESLRLSCAASGFTFSNYRMYWVRMAPGKGLEWVSDIDRSGTYTYYADSVKGRFAISRDNAKNTVYLQMNSLKPEDTAVYYCAADRRLIVDLTPEVYDHWGQGTQVTVSSGGGGSGGGGSGGGGSGGGGSQLQLVESGGGLVQPGESLRLSCAASGFTFSNYRMYWVRMAPGKGLEWVSDIDRSGTYTYYADSVKGRFAISRDNAKNTVYLQMNSLKPEDTAVYYCAADRRLIVDLTPEVYDHWGQGTQVTVSSGSSSSGSSSSPPSFSEGSGGSRTPEKGFSDREPTRPPRPILQRQDDIVQEKRLSRGISHASSSIVSLARSHVSSNGGGGGSNEHPLEMPICAFQLPDLTVYNEDFRSFIERDLIEQSMLVALEQAGRLNWWVSVDPTSQRLLPLATTGDGNCLLHAASLGMWGFHDRDLMLRKALYALMEKGVEKEALKRRWRWQQTQQNKESGLVYTEDEWQKEWNELIKLASSEPRMHLGTNGANCGGVESSEEPVYESLEEFHVFVLAHVLRRPIVVVADTMLRDSGGEAFAPIPFGGIYLPLEVPASQCHRSPLVLAYDQAHFSALVSMEQKENTKEQAVIPLTDSEYKLLPLHFAVDPGKGWEWGKDDSDNVRLASVILSLEVKLHLLHSYMNVKWIPLSSDAQAPLAQ

SEQ ID NO: 358 - protein, 676 aa, Artificial Sequence
  Description of Artificial Sequence: Synthetic polypeptide
QVQLVESGGGLVQPGGSLRLSCAASGFIFSSYQMAWVRQAPGKGLEWVADINTGGWNTYYADSVKGRFTISRDNAKNTLYLEMNSLKPEDTAVYYCAADRWMVAKIVGGDLDFDSWGQGTQVTVSSGGGGSGGGGSGGGGSGGGGSQVQLVESGGGLVQPGGSLRLSCAASGFIFSSYQMAWVRQAPGKGLEWVADINTGGWNTYYADSVKGRFTISRDNAKNTLYLEMNSLKPEDTAVYYCAADRWMVAKIVGGDLDFDSWGQGTQVTVSSGSSSSGSSSSPPSFSEGSGGSRTPEKGFSDREPTRPPRPILQRQDDIVQEKRLSRGISHASSSIVSLARSHVSSNGGGGGSNEHPLEMPICAFQLPDLTVYNEDFRSFIERDLIEQSMLVALEQAGRLNWWVSVDPTSQRLLPLATTGDGNCLLHAASLGMWGFHDRDLMLRKALYALMEKGVEKEALKRRWRWQQTQQNKESGLVYTEDEWQKEWNELIKLASSEPRMHLGTNGANCGGVESSEEPVYESLEEFHVFVLAHVLRRPIVVVADTMLRDSGGEAFAPIPFGGIYLPLEVPASQCHRSPLVLAYDQAHFSALVSMEQKENTKEQAVIPLTDSEYKLLPLHFAVDPGKGWEWGKDDSDNVRLASVILSLEVKLHLLHSYMNVKWIPLSSDAQAPLAQ

SEQ ID NO: 359 - protein, 662 aa, Artificial Sequence
  Description of Artificial Sequence: Synthetic polypeptide
QVQLVESGGGLVQPGGSLRLSCAASGFAFGSYDMSWVRQAPGQGPEWVSAITPGGGGTFYAYYSDSVKGRFAISRDNAKNTLTLQMNSLKPDDTAMYYCAKNFYGNGGRGHGTQVTVSSGGGGSGGGGSGGGGSGGGGSQVQLVESGGGLVQPGGSLRLSCAASGFAFGSYDMSWVRQAPGQGPEWVSAITPGGGGTFYAYYSDSVKGRFAISRDNAKNTLTLQMNSLKPDDTAMYYCAKNFYGNGGRGHGTQVTVSSGSSSSGSSSSPPSFSEGSGGSRTPEKGFSDREPTRPPRPILQRQDDIVQEKRLSRGISHASSSIVSLARSHVSSNGGGGGSNEHPLEMPICAFQLPDLTVYNEDFRSFIERDLIEQSMLVALEQAGRLNWWVSVDPTSQRLLPLATTGDGNCLLHAASLGMWGFHDRDLMLRKALYALMEKGVEKEALKRRWRWQQTQQNKESGLVYTEDEWQKEWNELIKLASSEPRMHLGTNGANCGGVESSEEPVYESLEEFHVFVLAHVLRRPIVVVADTMLRDSGGEAFAPIPFGGIYLPLEVPASQCHRSPLVLAYDQAHFSALVSMEQKENTKEQAVIPLTDSEYKLLPLHFAVDPGKGWEWGKDDSDNVRLASVILSLEVKLHLLHSYMNVKWIPLSSDAQAPLAQ

SEQ ID NO: 360 - protein, 658 aa, Artificial Sequence
  Description of Artificial Sequence: Synthetic polypeptide
QVQLVESGGGLVQPGGSLRLACAASGFTFGTHAMHWVRWAPGKGFEWVSTISSGGGGTRYADSVKGRFTISRDNAKNTVYLQMDNLKPEDTAVYYCNSPSNIANDNWGQGTQVTVSSGGGGSGGGGSGGGGSGGGGSQVQLVESGGGLVQPGGSLRLACAASGFTFGTHAMHWVRWAPGKGFEWVSTISSGGGGTRYADSVKGRFTISRDNAKNTVYLQMDNLKPEDTAVYYCNSPSNIANDNWGQGTQVTVSSGSSSSGSSSSPPSFSEGSGGSRTPEKGFSDREPTRPPRPILQRQDDIVQEKRLSRGISHASSSIVSLARSHVSSNGGGGGSNEHPLEMPICAFQLPDLTVYNEDFRSFIERDLIEQSMLVALEQAGRLNWWVSVDPTSQRLLPLATTGDGNCLLHAASLGMWGFHDRDLMLRKALYALMEKGVEKEALKRRWRWQQTQQNKESGLVYTEDEWQKEWNELIKLASSEPRMHLGTNGANCGGVESSEEPVYESLEEFHVFVLAHVLRRPIVVVADTMLRDSGGEAFAPIPFGGIYLPLEVPASQCHRSPLVLAYDQAHFSALVSMEQKENTKEQAVIPLTDSEYKLLPLHFAVDPGKGWEWGKDDSDNVRLASVILSLEVKLHLLHSYMNVKWIPLSSDAQAPLAQ

SEQ ID NO: 361 - protein, 672 aa, Artificial Sequence
  Description of Artificial Sequence: Synthetic polypeptide
QVQLVESGGGLVQAGASLRLSCAASERTFGHYAMGWFRQAPGKEREFVATISWKGGTTGYAHSVKGRFTISRDSAKNMVYLQMNSLKPEDTAVYYCAARNTMSGSMSSSAYPYWGQGTQVTVSSGGGGSGGGGSGGGGSGGGGSQVQLVESGGGLVQAGASLRLSCAASERTFGHYAMGWFRQAPGKEREFVATISWKGGTTGYAHSVKGRFTISRDSAKNMVYLQMNSLKPEDTAVYYCAARNTMSGSMSSSAYPYWGQGTQVTVSSGSSSSGSSSSPPSFSEGSGGSRTPEKGFSDREPTRPPRPILQRQDDIVQEKRLSRGISHASSSIVSLARSHVSSNGGGGGSNEHPLEMPICAFQLPDLTVYNEDFRSFIERDLIEQSMLVALEQAGRLNWWVSVDPTSQRLLPLATTGDGNCLLHAASLGMWGFHDRDLMLRKALYALMEKGVEKEALKRRWRWQQTQQNKESGLVYTEDEWQKEWNELIKLASSEPRMHLGTNGANCGGVESSEEPVYESLEEFHVFVLAHVLRRPIVVVADTMLRDSGGEAFAPIPFGGIYLPLEVPASQCHRSPLVLAYDQAHFSALVSMEQKENTKEQAVIPLTDSEYKLLPLHFAVDPGKGWEWGKDDSDNVRLASVILSLEVKLHLLHSYMNVKWIPLSSDAQAPLAQ

SEQ ID NO: 362 - protein, 665 aa, Artificial Sequence
  Description of Artificial Sequence: Synthetic polypeptide
QVQLVESGGGLVQPGGSLRLSCAASGFSFSNFPMMWVRQAPGKGREWVADINQDGRNTYYADSVKGRFTISRDNAKTTVYLQMNNLNPEDTAVYYCQAIRTTTHFDSWGQGTQVTVSSGGGGSGGGGSGGGGSGGGGSQVQLVESGGGLVQPGGSLRLSCAASGFSFSNFPMMWVRQAPGKGREWVADINQDGRNTYYADSVKGRFTISRDNAKTTVYLQMNNLNPEDTAVYYCQAIRTTTHFDSWGQGTQVTVSSGSSSSGSSSSGSSSSPPSFSEGSGGSRTPEKGFSDREPTRPPRPILQRQDDIVQEKRLSRGISHASSSIVSLARSHVSSNGGGGGSNEHPLEMPICAFQLPDLTVYNEDFRSFIERDLIEQSMLVALEQAGRLNWWVSVDPTSQRLLPLATTGDGNCLLHAASLGMWGFHDRDLMLRKALYALMEKGVEKEALKRRWRWQQTQQNKESGLVYTEDEWQKEWNELIKLASSEPRMHLGTNGANCGGVESSEEPVYESLEEFHVFVLAHVLRRPIVVVADTMLRDSGGEAFAPIPFGGIYLPLEVPASQCHRSPLVLAYDQAHFSALVSMEQKENTKEQAVIPLTDSEYKLLPLHFAVDPGKGWEWGKDDSDNVRLASVILSLEVKLHLLHSYMNVKWIPLSSDAQAPLAQ

SEQ ID NO: 363 - protein, 677 aa, Artificial Sequence
  Description of Artificial Sequence: Synthetic polypeptide
QLQLVESGGGLVQPGESLRLSCAASGFTFSNYRMYWVRMAPGKGLEWVSDIDRSGTYTYYADSVKGRFAISRDNAKNTVYLQMNSLKPEDTAVYYCAADRRLIVDLTPEVYDHWGQGTQVTVSSGGGGSGGGGSGGGGSGGGGSQLQLVESGGGLVQPGESLRLSCAASGFTFSNYRMYWVRMAPGKGLEWVSDIDRSGTYTYYADSVKGRFAISRDNAKNTVYLQMNSLKPEDTAVYYCAADRRLIVDLTPEVYDHWGQGTQVTVSSGSSSSGSSSSGSSSSPPSFSEGSGGSRTPEKGFSDREPTRPPRPILQRQDDIVQEKRLSRGISHASSSIVSLARSHVSSNGGGGGSNEHPLEMPICAFQLPDLTVYNEDFRSFIERDLIEQSMLVALEQAGRLNWWVSVDPTSQRLLPLATTGDGNCLLHAASLGMWGFHDRDLMLRKALYALMEKGVEKEALKRRWRWQQTQQNKESGLVYTEDEWQKEWNELIKLASSEPRMHLGTNGANCGGVESSEEPVYESLEEFHVFVLAHVLRRPIVVVADTMLRDSGGEAFAPIPFGGIYLPLEVPASQCHRSPLVLAYDQAHFSALVSMEQKENTKEQAVIPLTDSEYKLLPLHFAVDPGKGWEWGKDDSDNVRLASVILSLEVKLHLLHSYMNVKWIPLSSDAQAPLAQ

SEQ ID NO: 364 - protein, 681 aa, Artificial Sequence
  Description of Artificial Sequence: Synthetic polypeptide
QVQLVESGGGLVQPGGSLRLSCAASGFIFSSYQMAWVRQAPGKGLEWVADINTGGWNTYYADSVKGRFTISRDNAKNTLYLEMNSLKPEDTAVYYCAADRWMVAKIVGGDLDFDSWGQGTQVTVSSGGGGSGGGGSGGGGSGGGGSQVQLVESGGGLVQPGGSLRLSCAASGFIFSSYQMAWVRQAPGKGLEWVADINTGGWNTYYADSVKGRFTISRDNAKNTLYLEMNSLKPEDTAVYYCAADRWMVAKIVGGDLDFDSWGQGTQVTVSSGSSSSGSSSSGSSSSPPSFSEGSGGSRTPEKGFSDREPTRPPRPILQRQDDIVQEKRLSRGISHASSSIVSLARSHVSSNGGGGGSNEHPLEMPICAFQLPDLTVYNEDFRSFIERDLIEQSMLVALEQAGRLNWWVSVDPTSQRLLPLATTGDGNCLLHAASLGMWGFHDRDLMLRKALYALMEKGVEKEALKRRWRWQQTQQNKESGLVYTEDEWQKEWNELIKLASSEPRMHLGTNGANCGGVESSEEPVYESLEEFHVFVLAHVLRRPIVVVADTMLRDSGGEAFAPIPFGGIYLPLEVPASQCHRSPLVLAYDQAHFSALVSMEQKENTKEQAVIPLTDSEYKLLPLHFAVDPGKGWEWGKDDSDNVRLASVILSLEVKLHLLHSYMNVKWIPLSSDAQAPLAQ

SEQ ID NO: 365 - protein, 667 aa, Artificial Sequence
  Description of Artificial Sequence: Synthetic polypeptide
QVQLVESGGGLVQPGGSLRLSCAASGFAFGSYDMSWVRQAPGQGPEWVSAITPGGGGTFYAYYSDSVKGRFAISRDNAKNTLTLQMNSLKPDDTAMYYCAKNFYGNGGRGHGTQVTVSSGGGGSGGGGSGGGGSGGGGSQVQLVESGGGLVQPGGSLRLSCAASGFAFGSYDMSWVRQAPGQGPEWVSAITPGGGGTFYAYYSDSVKGRFAISRDNAKNTLTLQMNSLKPDDTAMYYCAKNFYGNGGRGHGTQVTVSSGSSSSGSSSSGSSSSPPSFSEGSGGSRTPEKGFSDREPTRPPRPILQRQDDIVQEKRLSRGISHASSSIVSLARSHVSSNGGGGGSNEHPLEMPICAFQLPDLTVYNEDFRSFIERDLIEQSMLVALEQAGRLNWWVSVDPTSQRLLPLATTGDGNCLLHAASLGMWGFHDRDLMLRKALYALMEKGVEKEALKRRWRWQQTQQNKESGLVYTEDEWQKEWNELIKLASSEPRMHLGTNGANCGGVESSEEPVYESLEEFHVFVLAHVLRRPIVVVADTMLRDSGGEAFAPIPFGGIYLPLEVPASQCHRSPLVLAYDQAHFSALVSMEQKENTKEQAVIPLTDSEYKLLPLHFAVDPGKGWEWGKDDSDNVRLASVILSLEVKLHLLHSYMNVKWIPLSSDAQAPLAQ

SEQ ID NO: 366 - protein, 663 aa, Artificial Sequence
  Description of Artificial Sequence: Synthetic polypeptide
QVQLVESGGGLVQPGGSLRLACAASGFTFGTHAMHWVRWAPGKGFEWVSTISSGGGGTRYADSVKGRFTISRDNAKNTVYLQMDNLKPEDTAVYYCNSPSNIANDNWGQGTQVTVSSGGGGSGGGGSGGGGSGGGGSQVQLVESGGGLVQPGGSLRLACAASGFTFGTHAMHWVRWAPGKGFEWVSTISSGGGGTRYADSVKGRFTISRDNAKNTVYLQMDNLKPEDTAVYYCNSPSNIANDNWGQGTQVTVSSGSSSSGSSSSGSSSSPPSFSEGSGGSRTPEKGFSDREPTRPPRPILQRQDDIVQEKRLSRGISHASSSIVSLARSHVSSNGGGGGSNEHPLEMPICAFQLPDLTVYNEDFRSFIERDLIEQSMLVALEQAGRLNWWVSVDPTSQRLLPLATTGDGNCLLHAASLGMWGFHDRDLMLRKALYALMEKGVEKEALKRRWRWQQTQQNKESGLVYTEDEWQKEWNELIKLASSEPRMHLGTNGANCGGVESSEEPVYESLEEFHVFVLAHVLRRPIVVVADTMLRDSGGEAFAPIPFGGIYLPLEVPASQCHRSPLVLAYDQAHFSALVSMEQKENTKEQAVIPLTDSEYKLLPLHFAVDPGKGWEWGKDDSDNVRLASVILSLEVKLHLLHSYMNVKWIPLSSDAQAPLAQ

SEQ ID NO: 367 - protein, 677 aa, Artificial Sequence
  Description of Artificial Sequence: Synthetic polypeptide
QVQLVESGGGLVQAGASLRLSCAASERTFGHYAMGWFRQAPGKEREFVATISWKGGTTGYAHSVKGRFTISRDSAKNMVYLQMNSLKPEDTAVYYCAARNTMSGSMSSSAYPYWGQGTQVTVSSGGGGSGGGGSGGGGSGGGGSQVQLVESGGGLVQAGASLRLSCAASERTFGHYAMGWFRQAPGKEREFVATISWKGGTTGYAHSVKGRFTISRDSAKNMVYLQMNSLKPEDTAVYYCAARNTMSGSMSSSAYPYWGQGTQVTVSSGSSSSGSSSSGSSSSPPSFSEGSGGSRTPEKGFSDREPTRPPRPILQRQDDIVQEKRLSRGISHASSSIVSLARSHVSSNGGGGGSNEHPLEMPICAFQLPDLTVYNEDFRSFIERDLIEQSMLVALEQAGRLNWWVSVDPTSQRLLPLATTGDGNCLLHAASLGMWGFHDRDLMLRKALYALMEKGVEKEALKRRWRWQQTQQNKESGLVYTEDEWQKEWNELIKLASSEPRMHLGTNGANCGGVESSEEPVYESLEEFHVFVLAHVLRRPIVVVADTMLRDSGGEAFAPIPFGGIYLPLEVPASQCHRSPLVLAYDQAHFSALVSMEQKENTKEQAVIPLTDSEYKLLPLHFAVDPGKGWEWGKDDSDNVRLASVILSLEVKLHLLHSYMNVKWIPLSSDAQAPLAQ

SEQ ID NO: 368 - protein, 132 aa, Artificial Sequence
  Description of Artificial Sequence: Synthetic polypeptide
MGSHHHHHHSGKSMDESRLDRVKEYEEEIHSLKERLHMSNRKLEEYERRLLSQEEQTSKILMQYQARLEQSEKRLRQQQAEKDSQIKSIIGRLMLVEEELRRDHPAMAEPLPEPKKRLLDAQERQLPPLGPT

SEQ ID NO: 369 - protein, 1252 aa, Artificial Sequence
  Description of Artificial Sequence: Synthetic polypeptide
MEDAKNIKKGPAPFYPLEDGTAGEQLHKAMKRYALVPGTIAFTDAHIEVDITYAEYFEMSVRLAEAMKRYGLNTNHRIVVCSENSLQFFMPVLGALFIGVAVAPANDIYNERELLNSMGISQPTVVFVSKKGLQKILNVQKKLPIIQKIIIMDSKTDYQGFQSMYTFVTSHLPPGFNEYDFVPESFDRDKTIALIMNSSGSTGLPKGVALPHRTACVRFSHARDPIFGNQIIPDTAILSVVPFHHGFGMFTTLGYLICGFRVVLMYRFEEELFLRSLQDYKIQSALLVPTLFSFFAKSTLIDKYDLSNLHEIASGGAPLSKEVGEAVAKRFHLPGIRQGYGLTETTSAILITPEGDDKPGAVGKVVPFFEAKVVDLDTGKTLGVNQRGELCVRGPMIMSGYVNNPEATNALIDKDGWLHSGDIAYWDEDEHFFIVDRLKSLIKYKGYQVAPAELESILLQHPNIFDAGVAGLPDDDAGELPAAVVVLEHGKTMTEKEIVDYVASQVTTAKKLRGGVVFVDEVPKGLTGKLDARKIREILIKAKKGGKIAVTRLKGSGATNFSLLKQAGDVEENPGPRSGTGSSGQVQLVESGGGLVQAGASLRLSCAASERTFGHYAMGWFRQAPGKEREFVATISWKGGTTGYAHSVKGRFTISRDSAKNMVYLQMNSLKPEDTAVYYCAARNTMSGSMSSSAYPYWGQGTQVTVSSGGGGSGGGGSGGGGSGGGGSQVQLVESGGGLVQAGASLRLSCAASERTFGHYAMGWFRQAPGKEREFVATISWKGGTTGYAHSVKGRFTISRDSAKNMVYLQMNSLKPEDTAVYYCAARNTMSGSMSSSAYPYWGQGTQVTVSSGAPGSGPPSFSEGSGGSRTPEKGFSDREPTRPPRPILQRQDDIVQEKRLSRGISHASSSIVSLARSHVSSNGGGGGSNEHPLEMPICAFQLPDLTVYNEDFRSFIERDLIEQSMLVALEQAGRLNWWVSVDPTSQRLLPLATTGDGNCLLHAASLGMWGFHDRDLMLRKALYALMEKGVEKEALKRRWRWQQTQQNKESGLVYTEDEWQKEWNELIKLASSEPRMHLGTNGANCGGVESSEEPVYESLEEFHVFVLAHVLRRPIVVVADTMLRDSGGEAFAPIPFGGIYLPLEVPASQCHRSPLVLAYDQAHFSALVSMEQKENTKEQAVIPLTDSEYKLLPLHFAVDPGKGWEWGKDDSDNVRLASVILSLEVKLHLLHSYMNVKWIPLSSDAQAPLAQ

SEQ ID NO: 370 - protein, 1238 aa, Artificial Sequence
  Description of Artificial Sequence: Synthetic polypeptide
MEDAKNIKKGPAPFYPLEDGTAGEQLHKAMKRYALVPGTIAFTDAHIEVDITYAEYFEMSVRLAEAMKRYGLNTNHRIVVCSENSLQFFMPVLGALFIGVAVAPANDIYNERELLNSMGISQPTVVFVSKKGLQKILNVQKKLPIIQKIIIMDSKTDYQGFQSMYTFVTSHLPPGFNEYDFVPESFDRDKTIALIMNSSGSTGLPKGVALPHRTACVRFSHARDPIFGNQIIPDTAILSVVPFHHGFGMFTTLGYLICGFRVVLMYRFEEELFLRSLQDYKIQSALLVPTLFSFFAKSTLIDKYDLSNLHEIASGGAPLSKEVGEAVAKRFHLPGIRQGYGLTETTSAILITPEGDDKPGAVGKVVPFFEAKVVDLDTGKTLGVNQRGELCVRGPMIMSGYVNNPEATNALIDKDGWLHSGDIAYWDEDEHFFIVDRLKSLIKYKGYQVAPAELESILLQHPNIFDAGVAGLPDDDAGELPAAVVVLEHGKTMTEKEIVDYVASQVTTAKKLRGGVVFVDEVPKGLTGKLDARKIREILIKAKKGGKIAVTRLKGSGATNFSLLKQAGDVEENPGPRSGTGSSGQVQLVESGGGLVQPGGSLRLACAASGFTFGTHAMHWVRWAPGKGFEWVSTISSGGGGTRYADSVKGRFTISRDNAKNTVYLQMDNLKPEDTAVYYCNSPSNIANDNWGQGTQVTVSSGGGGSGGGGSGGGGSGGGGSQVQLVESGGGLVQPGGSLRLACAASGFTFGTHAMHWVRWAPGKGFEWVSTISSGGGGTRYADSVKGRFTISRDNAKNTVYLQMDNLKPEDTAVYYCNSPSNIANDNWGQGTQVTVSSGAPGSGPPSFSEGSGGSRTPEKGFSDREPTRPPRPILQRQDDIVQEKRLSRGISHASSSIVSLARSHVSSNGGGGGSNEHPLEMPICAFQLPDLTVYNEDFRSFIERDLIEQSMLVALEQAGRLNWWVSVDPTSQRLLPLATTGDGNCLLHAASLGMWGFHDRDLMLRKALYALMEKGVEKEALKRRWRWQQTQQNKESGLVYTEDEWQKEWNELIKLASSEPRMHLGTNGANCGGVESSEEPVYESLEEFHVFVLAHVLRRPIVVVADTMLRDSGGEAFAPIPFGGIYLPLEVPASQCHRSPLVLAYDQAHFSALVSMEQKENTKEQAVIPLTDSEYKLLPLHFAVDPGKGWEWGKDDSDNVRLASVILSLEVKLHLLHSYMNVKWIPLSSDAQAPLAQ

SEQ ID NO: 371 - protein, 1242 aa, Artificial Sequence
  Description of Artificial Sequence: Synthetic polypeptide
MEDAKNIKKGPAPFYPLEDGTAGEQLHKAMKRYALVPGTIAFTDAHIEVDITYAEYFEMSVRLAEAMKRYGLNTNHRIVVCSENSLQFFMPVLGALFIGVAVAPANDIYNERELLNSMGISQPTVVFVSKKGLQKILNVQKKLPIIQKIIIMDSKTDYQGFQSMYTFVTSHLPPGFNEYDFVPESFDRDKTIALIMNSSGSTGLPKGVALPHRTACVRFSHARDPIFGNQIIPDTAILSVVPFHHGFGMFTTLGYLICGFRVVLMYRFEEELFLRSLQDYKIQSALLVPTLFSFFAKSTLIDKYDLSNLHEIASGGAPLSKEVGEAVAKRFHLPGIRQGYGLTETTSAILITPEGDDKPGAVGKVVPFFEAKVVDLDTGKTLGVNQRGELCVRGPMIMSGYVNNPEATNALIDKDGWLHSGDIAYWDEDEHFFIVDRLKSLIKYKGYQVAPAELESILLQHPNIFDAGVAGLPDDDAGELPAAVVVLEHGKTMTEKEIVDYVASQVTTAKKLRGGVVFVDEVPKGLTGKLDARKIREILIKAKKGGKIAVTRLKGSGATNFSLLKQAGDVEENPGPRSGTGSSGQVQLVESGGGLVQPGGSLRLSCAASGFAFGSYDMSWVRQAPGQGPEWVSAITPGGGGTFYAYYSDSVKGRFAISRDNAKNTLTLQMNSLKPDDTAMYYCAKNFYGNGGRGHGTQVTVSSGGGGSGGGGSGGGGSGGGGSQVQLVESGGGLVQPGGSLRLSCAASGFAFGSYDMSWVRQAPGQGPEWVSAITPGGGGTFYAYYSDSVKGRFAISRDNAKNTLTLQMNSLKPDDTAMYYCAKNFYGNGGRGHGTQVTVSSGAPGSGPPSFSEGSGGSRTPEKGFSDREPTRPPRPILQRQDDIVQEKRLSRGISHASSSIVSLARSHVSSNGGGGGSNEHPLEMPICAFQLPDLTVYNEDFRSFIERDLIEQSMLVALEQAGRLNWWVSVDPTSQRLLPLATTGDGNCLLHAASLGMWGFHDRDLMLRKALYALMEKGVEKEALKRRWRWQQTQQNKESGLVYTEDEWQKEWNELIKLASSEPRMHLGTNGANCGGVESSEEPVYESLEEFHVFVLAHVLRRPIVVVADTMLRDSGGEAFAPIPFGGIYLPLEVPASQCHRSPLVLAYDQAHFSALVSMEQKENTKEQAVIPLTDSEYKLLPLHFAVDPGKGWEWGKDDSDNVRLASVILSLEVKLHLLHSYMNVKWIPLSSDAQAPLAQ

SEQ ID NO: 372 - protein, 1256 aa, Artificial Sequence
  Description of Artificial Sequence: Synthetic polypeptide
MEDAKNIKKGPAPFYPLEDGTAGEQLHKAMKRYALVPGTIAFTDAHIEVDITYAEYFEMSVRLAEAMKRYGLNTNHRIVVCSENSLQFFMPVLGALFIGVAVAPANDIYNERELLNSMGISQPTVVFVSKKGLQKILNVQKKLPIIQKIIIMDSKTDYQGFQSMYTFVTSHLPPGFNEYDFVPESFDRDKTIALIMNSSGSTGLPKGVALPHRTACVRFSHARDPIFGNQIIPDTAILSVVPFHHGFGMFTTLGYLICGFRVVLMYRFEEELFLRSLQDYKIQSALLVPTLFSFFAKSTLIDKYDLSNLHEIASGGAPLSKEVGEAVAKRFHLPGIRQGYGLTETTSAILITPEGDDKPGAVGKVVPFFEAKVVDLDTGKTLGVNQRGELCVRGPMIMSGYVNNPEATNALIDKDGWLHSGDIAYWDEDEHFFIVDRLKSLIKYKGYQVAPAELESILLQHPNIFDAGVAGLPDDDAGELPAAVVVLEHGKTMTEKEIVDYVASQVTTAKKLRGGVVFVDEVPKGLTGKLDARKIREILIKAKKGGKIAVTRLKGSGATNFSLLKQAGDVEENPGPRSGTGSSGQVQLVESGGGLVQPGGSLRLSCAASGFIFSSYQMAWVRQAPGKGLEWVADINTGGWNTYYADSVKGRFTISRDNAKNTLYLEMNSLKPEDTAVYYCAADRWMVAKIVGGDLDFDSWGQGTQVTVSSGGGGSGGGGSGGGGSGGGGSQVQLVESGGGLVQPGGSLRLSCAASGFIFSSYQMAWVRQAPGKGLEWVADINTGGWNTYYADSVKGRFTISRDNAKNTLYLEMNSLKPEDTAVYYCAADRWMVAKIVGGDLDFDSWGQGTQVTVSSGAPGSGPPSFSEGSGGSRTPEKGFSDREPTRPPRPILQRQDDIVQEKRLSRGISHASSSIVSLARSHVSSNGGGGGSNEHPLEMPICAFQLPDLTVYNEDFRSFIERDLIEQSMLVALEQAGRLNWWVSVDPTSQRLLPLATTGDGNCLLHAASLGMWGFHDRDLMLRKALYALMEKGVEKEALKRRWRWQQTQQNKESGLVYTEDEWQKEWNELIKLASSEPRMHLGTNGANCGGVESSEEPVYESLEEFHVFVLAHVLRRPIVVVADTMLRDSGGEAFAPIPFGGIYLPLEVPASQCHRSPLVLAYDQAHFSALVSMEQKENTKEQAVIPLTDSEYKLLPLHFAVDPGKGWEWGKDDSDNVRLASVILSLEVKLHLLHSYMNVKWIPLSSDAQAPLAQ

SEQ ID NO: 373 - protein, 1108 aa, Artificial Sequence
  Description of Artificial Sequence: Synthetic polypeptide
MEDAKNIKKGPAPFYPLEDGTAGEQLHKAMKRYALVPGTIAFTDAHIEVDITYAEYFEMSVRLAEAMKRYGLNTNHRIVVCSENSLQFFMPVLGALFIGVAVAPANDIYNERELLNSMGISQPTVVFVSKKGLQKILNVQKKLPIIQKIIIMDSKTDYQGFQSMYTFVTSHLPPGFNEYDFVPESFDRDKTIALIMNSSGSTGLPKGVALPHRTACVRFSHARDPIFGNQIIPDTAILSVVPFHHGFGMFTTLGYLICGFRVVLMYRFEEELFLRSLQDYKIQSALLVPTLFSFFAKSTLIDKYDLSNLHEIASGGAPLSKEVGEAVAKRFHLPGIRQGYGLTETTSAILITPEGDDKPGAVGKVVPFFEAKVVDLDTGKTLGVNQRGELCVRGPMIMSGYVNNPEATNALIDKDGWLHSGDIAYWDEDEHFFIVDRLKSLIKYKGYQVAPAELESILLQHPNIFDAGVAGLPDDDAGELPAAVVVLEHGKTMTEKEIVDYVASQVTTAKKLRGGVVFVDEVPKGLTGKLDARKIREILIKAKKGGKIAVTRLKGSGATNFSLLKQAGDVEENPGPRSGTGSSGQLQLVESGGGLVQPGESLRLSCAASGFTFSNYRMYWVRMAPGKGLEWVSDIDRSGTYTYYADSVKGRFAISRDNAKNTVYLQMNSLKPEDTAVYYCAADRRLIVDLTPEVYDHWGQGTQVTVSSGAPGSGPPSFSEGSGGSRTPEKGFSDREPTRPPRPILQRQDDIVQEKRLSRGISHASSSIVSLARSHVSSNGGGGGSNEHPLEMPICAFQLPDLTVYNEDFRSFIERDLIEQSMLVALEQAGRLNWWVSVDPTSQRLLPLATTGDGNCLLHAASLGMWGFHDRDLMLRKALYALMEKGVEKEALKRRWRWQQTQQNKESGLVYTEDEWQKEWNELIKLASSEPRMHLGTNGANCGGVESSEEPVYESLEEFHVFVLAHVLRRPIVVVADTMLRDSGGEAFAPIPFGGIYLPLEVPASQCHRSPLVLAYDQAHFSALVSMEQKENTKEQAVIPLTDSEYKLLPLHFAVDPGKGWEWGKDDSDNVRLASVILSLEVKLHLLHSYMNVKWIPLSSDAQAPLAQ

SEQ ID NO: 374 - protein, 1102 aa, Artificial Sequence
  Description of Artificial Sequence: Synthetic polypeptide
MEDAKNIKKGPAPFYPLEDGTAGEQLHKAMKRYALVPGTIAFTDAHIEVDITYAEYFEMSVRLAEAMKRYGLNTNHRIVVCSENSLQFFMPVLGALFIGVAVAPANDIYNERELLNSMGISQPTVVFVSKKGLQKILNVQKKLPIIQKIIIMDSKTDYQGFQSMYTFVTSHLPPGFNEYDFVPESFDRDKTIALIMNSSGSTGLPKGVALPHRTACVRFSHARDPIFGNQIIPDTAILSVVPFHHGFGMFTTLGYLICGFRVVLMYRFEEELFLRSLQDYKIQSALLVPTLFSFFAKSTLIDKYDLSNLHEIASGGAPLSKEVGEAVAKRFHLPGIRQGYGLTETTSAILITPEGDDKPGAVGKVVPFFEAKVVDLDTGKTLGVNQRGELCVRGPMIMSGYVNNPEATNALIDKDGWLHSGDIAYWDEDEHFFIVDRLKSLIKYKGYQVAPAELESILLQHPNIFDAGVAGLPDDDAGELPAAVVVLEHGKTMTEKEIVDYVASQVTTAKKLRGGVVFVDEVPKGLTGKLDARKIREILIKAKKGGKIAVTRLKGSGATNFSLLKQAGDVEENPGPRSGTGSSGQVQLVESGGGLVQPGGSLRLSCAASGFSFSNFPMMWVRQAPGKGREWVADINQDGRNTYYADSVKGRFTISRDNAKTTVYLQMNNLNPEDTAVYYCQAIRTTTHFDSWGQGTQVTVSSGAPGSGPPSFSEGSGGSRTPEKGFSDREPTRPPRPILQRQDDIVQEKRLSRGISHASSSIVSLARSHVSSNGGGGGSNEHPLEMPICAFQLPDLTVYNEDFRSFIERDLIEQSMLVALEQAGRLNWWVSVDPTSQRLLPLATTGDGNCLLHAASLGMWGFHDRDLMLRKALYALMEKGVEKEALKRRWRWQQTQQNKESGLVYTEDEWQKEWNELIKLASSEPRMHLGTNGANCGGVESSEEPVYESLEEFHVFVLAHVLRRPIVVVADTMLRDSGGEAFAPIPFGGIYLPLEVPASQCHRSPLVLAYDQAHFSALVSMEQKENTKEQAVIPLTDSEYKLLPLHFAVDPGKGWEWGKDDSDNVRLASVILSLEVKLHLLHSYMNVKWIPLSSDAQAPLAQ

SEQ ID NO: 375 - protein, 25 aa, Artificial Sequence
  Description of Artificial Sequence: Synthetic peptide
GGGGSGGGGSGGGGSGGGGSGGGGS

SEQ ID NO: 376 - protein, 20 aa, Artificial Sequence
  Description of Artificial Sequence: Synthetic peptide
GGGGSGGGGSGGGGSGGGGS

SEQ ID NO: 377 - protein, 15 aa, Artificial Sequence
  Description of Artificial Sequence: Synthetic peptide
GGGGSGGGGSGGGGS

SEQ ID NO: 378 - protein, 10 aa, Artificial Sequence
  Description of Artificial Sequence: Synthetic peptide
GGGGSGGGGS

SEQ ID NO: 379 - protein, 5 aa, Artificial Sequence
  Description of Artificial Sequence: Synthetic peptide
GGGGS

SEQ ID NO: 380 - protein, 16 aa, Artificial Sequence
  Description of Artificial Sequence: Synthetic peptide
SGGGGSGGGGSGGGGS

SEQ ID NO: 381 - protein, 15 aa, Artificial Sequence
  Description of Artificial Sequence: Synthetic peptide
SGGGGSGGGGSGGGG

SEQ ID NO: 382 - protein, 10 aa, Artificial Sequence
  Description of Artificial Sequence: Synthetic peptide
SGGGGSGGGG

SEQ ID NO: 383 - protein, 5 aa, Artificial Sequence
  Description of Artificial Sequence: Synthetic peptide
SGGGG

SEQ ID NO: 384 - protein, 5 aa, Artificial Sequence
  Description of Artificial Sequence: Synthetic peptide
GGSGG

SEQ ID NO: 385 - protein, 170 aa, Artificial Sequence
  Description of Artificial Sequence: Synthetic polypeptide
VFTLEDFVGDWRQTAGYNLDQVLEQGGVSSLFQNLGVSVTPIQRIVLSGENGLKIDIHVIIPYEGLSGDQMGQIEKIFKVVYPVDDHHFKVILHYGTLVIDGVTPNMIDYFGRPYEGIAVFDGKKITVTGTLWNGNKIIDERLINPDGSLLFRVTINGVTGWRLCERILA

SEQ ID NO: 386 - protein, 554 aa, Artificial Sequence
  Description of Artificial Sequence: Synthetic polypeptide
MEDAKNIKKGPAPFYPLEDGTAGEQLHKAMKRYALVPGTIAFTDAHIEVDITYAEYFEMSVRLAEAMKRYGLNTNHRIVVCSENSLQFFMPVLGALFIGVAVAPANDIYNERELLNSMGISQPTVVFVSKKGLQKILNVQKKLPIIQKIIIMDSKTDYQGFQSMYTFVTSHLPPGFNEYDFVPESFDRDKTIALIMNSSGSTGLPKGVALPHRTACVRFSHARDPIFGNQIIPDTAILSVVPFHHGFGMFTTLGYLICGFRVVLMYRFEEELFLRSLQDYKIQSALLVPTLFSFFAKSTLIDKYDLSNLHEIASGGAPLSKEVGEAVAKRFHLPGIRQGYGLTETTSAILITPEGDDKPGAVGKVVPFFEAKVVDLDTGKTLGVNQRGELCVRGPMIMSGYVNNPEATNALIDKDGWLHSGDIAYWDEDEHFFIVDRLKSLIKYKGYQVAPAELESILLQHPNIFDAGVAGLPDDDAGELPAAVVVLEHGKTMTEKEIVDYVASQVTTAKKLRGGVVFVDEVPKGLTGKLDARKIREILIKAKKGGKIAVTRLK

SEQ ID NO: 387 - protein, 15 aa, Artificial Sequence
  Description of Artificial Sequence: Synthetic peptide
PSRLEEELRRRLTEP

SEQ ID NO: 388 - protein, 22 aa, Artificial Sequence
  Description of Artificial Sequence: Synthetic peptide
GSGATNFSLLKQAGDVEENPGP

SEQ ID NO: 389 - protein, 394 aa, Artificial Sequence; identical to SEQ ID NO: 252
  Description of Artificial Sequence: Synthetic polypeptide

SEQ ID NO: 390 - protein, 1924 aa, Artificial Sequence
  Description of Artificial Sequence: Synthetic polypeptide
MDGPGASAVVVRVGIPDLQQTKCLRLDPAAPVWAAKQRVLCALNHSLQDALNYGLFQPPSRGRAGKFLDEERLLQEYPPNLDTPLPYLEFRYKRRVYAQNLIDDKQFAKLHTKANLKKFMDYVQLHSTDKVARLLDKGLDPNFHDPDSGECPLSLAAQLDNATDLLKVLKNGGAHLDFRTRDGLTAVHCATRQRNAAALTTLLDLGASPDYKDSRGLTPLYHSALGGGDALCCELLLHDHAQLGITDENGWQEIHQACRFGHVQHLEHLLFYGADMGAQNASGNTALHICALYNQESCARVLLFRGANRDVRNYNSQTAFQVAIIAGNFELAEVIKTHKDSDVVPFRETPSYAKRRRLAGPSGLASPRPLQRSASDINLKGEAQPAASPGPSLRSLPHQLLLQRLQEEKDRDRDADQESNISGPLAGRAGQSKISPSGPGGPGPAPGPGPAPPAPPAPPPRGPKRKLYSAVPGRKFIAVKAHSPQGEGEIPLHRGEAVKVLSIGEGGFWEGTVKGRTGWFPADCVEEVQMRQHDTRPETREDRTKRLFRHYTVGSYDSLTSHSDYVIDDKVAVLQKRDHEGFGFVLRGAKAETPIEEFTPTPAFPALQYLESVDVEGVAWRAGLRTGDFLIEVNGVNVVKVGHKQVVALIRQGGNRLVMKVVSVTRKPEEDGARRRAPPPPKRAPSTTLTLRSKSMTAELEELASIRRRKGEKLDEMLAAAAEPTLRPDIADADSRAATVKQRPTSRRITPAEISSLFERQGLPGPEKLPGSLRKGIPRTKSVGEDEKLASLLEGRFPRSTSMQDPVREGRGIPPPPQTAPPPPPAPYYFDSGPPPAFSPPPPPGRAYDTVRSSFKPGLEARLGAGAAGLYEPGAALGPLPYPERQKRARSMIILQDSAPESGDAPRPPPAATPPERPKRRPRPPGPDSPYANLGAFSASLFAPSKPQRRKSPLVKQLQVEDAQERAALAVGSPGPGGGSFAREPSPTHRGPRPGGLDYGAGDGPGLAFGGPGPAKDRRLEERRRSTVFLSVGAIEGSAPGADLPSLQPSRSIDERLLGTGPTAGRDLLLPSPVSALKPLVSGPSLGPSGSTFIHPLTGKPLDPSSPLALALAARERALASQAPSRSPTPVHSPDADRPGPLFVDVQARDPERGSLASPAFSPRSPAWIPVPARREAEKVPREERKSPEDKKSMILSVLDTSLQRPAGLIVVHATSNGQEPSRLGGAEEERPGTPELAPAPMQSAAVAEPLPSPRAQPPGGTPADAGPGQGSSEEEPELVFAVNLPPAQLSSSDEETREELARIGLVPPPEEFANGVLLATPLAGPGPSPTTVPSPASGKPSSEPPPAPESAADSGVEEADTRSSSDPHLETTSTISTVSSMSTLSSESGELTDTHTSFADGHTFLLEKPPVPPKPKLKSPLGKGPVTFRDPLLKQSSDSELMAQQHHAASAGLASAAGPARPRYLFQRRSKLWGDPVESRGLPGPEDDKPTVISELSSRLQQLNKDTRSLGEEPVGGLGSLLDPAKKSPIAAARLFSSLGELSSISAQRSPGGPGGGASYSVRPSGRYPVARRAPSPVKPASLERVEGLGAGAGGAGRPFGLTPPTILKSSSLSIPHEPKEVRFVVRSVSARSRSPSPSPLPSPASGPGPGAPGPRRPFQQKPLQLWSKFDVGDWLESIHLGEHRDRFEDHEIEGAHLPALTKDDFVELGVTRVGHRMNIERALRQLDGSKVPVFTLEDFVGDWRQTAGYNLDQVLEQGGVSSLFQNLGVSVTPIQRIVLSGENGLKIDIHVIIPYEGLSGDQMGQIEKIFKVVYPVDDHHFKVILHYGTLVIDGVTPNMIDYFGRPYEGIAVFDGKKITVTGTLWNGNKIIDERLINPDGSLLFRVTINGVTGWRLCERILAGGGGSPSRLEEELRRRLTEP

SEQ ID NO: 391 - protein, 1153 aa, Artificial Sequence
  Description of Artificial Sequence: Synthetic polypeptide
MKIPNIGNVMNKFEILGVVGEGAYGVVLKCRHKETHEIVAIKKFKDSEENEEVKETTLRELKMLRTLKQENIVELKEAFRRRGKLYLVFEYVEKNMLELLEEMPNGVPPEKVKSYIYQLIKAIHWCHKNDIVHRDIKPENLLISHNDVLKLCDFGFARNLSEGNNANYTEYVATRWYRSPELLLGAPYGKSVDMWSVGCILGELSDGQPLFPGESEIDQLFTIQKVLGPLPSEQMKLFYSNPRFHGLRFPAVNHPQSLERRYLGILNSVLLDLMKNLLKLDPADRYLTEQCLNHPTFQTQRLLDRSPSRSAKRKPYHVESSTLSNRNQAGKSTALQSHHRSNSKDIQNLSVGLPRADEGLPANESFLNGNLAGASLSPLHTKTYQASSQPGSTSKDLTNNNIPHLLSPKEAKSKTEFDFNIDPKPSEGPGTKYLKSNSRSQQNRHSFMESSQSKAGTLQPNEKQSRHSYIDTIPQSSRSPSYRTKAKSHGALSDSKSVSNLSEARAQIAEPSTSRYFPSSCLDLNSPTSPTPTRHSDTRTLLSPSGRNNRNEGTLDSRRTTTRHSKTMEELKLPEHMDSSHSHSLSAPHESFSYGLGYTSPFSSQQRPHRHSMYVTRDKVRAKGLDGSLSIGQGMAARANSLQLLSPQPGEQLPPEMTVARSSVKETSREGTSSFHTRQKSEGGVYHDPHSDDGTAPKENRHLYNDPVPRRVGSFYRVPSPRPDNSFHENNVSTRVSSLPSESSSGTNHSKRQPAFDPWKSPENISHSEQLKEKEKQGFFRSMKKKKKKSQTVPNSDSPDLLTLQKSIHSASTPSSRPKEWRPEKISDLQTQSQPLKSLRKLLHLSSASNHPASSDPRFQPLTAQQTKNSFSEIRIHPLSQASGGSSNIRQEPAPKGRPALQLPGQMDPGWHVSSVTRSATEGPSYSEQLGAKSGPNGHPYNRTNRSRMPNLNDLKETALKVPVFTLEDFVGDWRQTAGYNLDQVLEQGGVSSLFQNLGVSVTPIQRIVLSGENGLKIDIHVIIPYEGLSGDQMGQIEKIFKVVYPVDDHHFKVILHYGTLVIDGVTPNMIDYFGRPYEGIAVFDGKKITVTGTLWNGNKIIDERLINPDGSLLFRVTINGVTGWRLCERILAGGGGSPSRLEEELRRRLTEP

SEQ ID NO: 392 - protein, 787 aa, Artificial Sequence
  Description of Artificial Sequence: Synthetic polypeptide
MAPIGLKAVVGEKIMHDVIKKVKKKGEWKVLVVDQLSMRMLSSCCKMTDIMTEGITIVEDINKRREPLPSLEAVYLITPSEKSVHSLISDFKDPPTAKYRAAHVFFTDSCPDALFNELVKSRAAKVIKTLTEINIAFLPYESQVYSLDSADSFQSFYSPHKAQMKNPILERLAEQIATLCATLKEYPAVRYRGEYKDNALLAQLIQDKLDAYKADDPTMGEGPDKARSQLLILDRGFDPSSPVLHELTFQAMSYDLLPIENDVYKYETSGIGEARVKEVLLDEDDDLWIALRHKHIAEVSQEVTRSLKDFSSSKRMNTGEKTTMRDLSQMLKKMPQYQKELSKYSTHLHLAEDCMKHYQGTVDKLCRVEQDLAMGTDAEGEKIKDPMRAIVPILLDANVSTYDKIRIILLYIFLKNGITEENLNKLIQHAQIPPEDSEIITNMAHLGVPIVTDSTLRRRSKPERKERISEQTYQLSRWTPIIKDIMEDTIEDKLDTKHYPYISTRSSASFSTTAVSARYGHWHKNKAPGEYRSGPRLIIFILGGVSLNEMRCAYEVTQANGKWEVLIGSTHILTPQKLLDTLKKLNKTDEEISSKVPVFTLEDFVGDWRQTAGYNLDQVLEQGGVSSLFQNLGVSVTPIQRIVLSGENGLKIDIHVIIPYEGLSGDQMGQIEKIFKVVYPVDDHHFKVILHYGTLVIDGVTPNMIDYFGRPYEGIAVFDGKKITVTGTLWNGNKIIDERLINPDGSLLFRVTINGVTGWRLCERILAGGGGSPSRLEEELRRRLTEP

SEQ ID NO: 393 - protein, 1057 aa, Artificial Sequence
  Description of Artificial Sequence: Synthetic polypeptide
MGNRGMEDLIPLVNRLQDAFSAIGQNADLDLPQIAVVGGQSAGKSSVLENFVGRDFLPRGSGIVTRRPLVLQLVNATTEYAEFLHCKGKKFTDFEEVRLEIEAETDRVTGTNKGISPVPINLRVYSPHVLNLTLVDLPGMTKVPVGDQPPDIEFQIRDMLMQFVTKENCLILAVSPANSDLANSDALKVAKEVDPQGQRTIGVITKLDLMDEGTDARDVLENKLLPLRRGYIGVVNRSQKDIDGKKDITAALAAERKFFLSHPSYRHLADRMGTPYLQKVLNQQLTNHIRDTLPGLRNKLQSQLLSIEKEVEEYKNFRPDDPARKTKALLQMVQQFAVDFEKRIEGSGDQIDTYELSGGARINRIFHERFPFELVKMEFDEKELRREISYAIKNIHGIRTGLFTPDMAFETIVKKQVKKIREPCLKCVDMVISELISTVRQCTKKLQQYPRLREEMERIVTTHIREREGRTKEQVMLLIDIELAYMNTNHEDFIGFANAQQRSNQMNKKKTSGNQDEILVIRKGWLTINNIGIMKGGSKEYWFVLTAENLSWYKDDEEKEKKYMLSVDNLKLRDVEKGFMSSKHIFALFNTEQRNVYKDYRQLELACETQEEVDSWKASFLRAGVYPERVGDKEKASETEENGSDSFMHSMDPQLERQVETIRNLVDSYMAIVNKTVRDLMPKTIMHLMINNTKEFIFSELLANLYSCGDQNTLMEESAEQAQRRDEMLRMYHALKEALSIIGDINTTTVSTPMPPPVDDSWLQVQSVPAGRRSPTSSPTPQRRAPAVPPARPGSRGPAPGPPPAGSALGGAPPVPSRPGASPDPFGPPPQVPSRPNRAPPGVPSRSGQASPSRPESPRPPFDLKVPVFTLEDFVGDWRQTAGYNLDQVLEQGGVSSLFQNLGVSVTPIQRIVLSGENGLKIDIHVIIPYEGLSGDQMGQIEKIFKVVYPVDDHHFKVILHYGTLVIDGVTPNMIDYFGRPYEGIAVFDGKKITVTGTLWNGNKIIDERLINPDGSLLFRVTINGVTGWRLCERILAGGGGSPSRLEEELRRRLTEP

SEQ ID NO: 394 - protein, 1883 aa, Artificial Sequence
  Description of Artificial Sequence: Synthetic polypeptide
MAGASVKVAVRVRPFNSREMSRDSKCIIQMSGSTTTIVNPKQPKETPKSFSFDYSYWSHTSPEDINYASQKQVYRDIGEEMLQHAFEGYNVCIFAYGQTGAGKSYTMMGKQEKDQQGIIPQLCEDLFSRINDTTNDNMSYSVEVSYMEIYCERVRDLLNPKNKGNLRVREHPLLGPYVEDLSKLAVTSYNDIQDLMDSGNKARTVAATNMNETSSRSHAVFNIIFTQKRHDAETNITTEKVSKISLVDLAGSERADSTGAKGTRLKEGANINKSLTTLGKVISALAEMDSGPNKNKKKKKTDFIPYRDSVLTWLLRENLGGNSRTAMVAALSPADINYDETLSTLRYADRAKQIRCNAVINEDPNNKLIRELKDEVTRLRDLLYAQGLGDITDMTNALVGMSPSSSLSALSSRAASVSSLHERILFAPGSEEAIERLKETEKIIAELNETWEEKLRRTEAIRMEREALLAEMGVAMREDGGTLGVFSPKKTPHLVNLNEDPLMSECLLYYIKDGITRVGREDGERRQDIVLSGHFIKEEHCVFRSDSRGGSEAVVTLEPCEGADTYVNGKKVTEPSILRSGNRIIMGKSHVFRFNHPEQARQERERTPCAETPAEPVDWAFAQRELLEKQGIDMKQEMEQRLQELEDQYRREREEATYLLEQQRLDYESKLEALQKQMDSRYYPEVNEEEEEPEDEVQWTERECELALWAFRKWKWYQFTSLRDLLWGNAIFLKEANAISVELKKKVQFQFVLLTDTLYSPLPPDLLPPEAAKDRETRPFPRTIVAVEVQDQKNGATHYWTLEKLRQRLDLMREMYDRAAEVPSSVIEDCDNVVTGGDPFYDRFPWFRLVGRAFVYLSNLLYPVPLVHRVAIVSEKGEVKGFLRVAVQAISADEEAPDYGSGVRQSGTAKISFDDQHFEKFQSESCPVVGMSRSGTSQEELRIVEGQGQGADVGPSADEVNNNTCSAVPPEGLLLDSSEKAALDGPLDAALDHLRLGNTFTFRVTVLQASSISAEYADIFCQFNFIHRHDEAFSTEPLKNTGRGPPLGFYHVQNIAVEVTKSFIEYIKSQPIVFEVFGHYQQHPFPPLCKDVLSPLRPSRRHFPRVMPLSKPVPATKLSTLTRPCPGPCHCKYDLLVYFEICELEANGDYIPAVVDHRGGMPCMGTFLLHQGIQRRITVTLLHETGSHIRWKEVRELVVGRIRNTPETDESLIDPNILSLNILSSGYIHPAQDDRTFYQFEAAWDSSMHNSLLLNRVTPYREKIYMTLSAYIEMENCTQPAVVTKDFCMVFYSRDAKLPASRSIRNLFGSGSLRASESNRVTGVYELSLCHVADAGSPGMQRRRRRVLDTSVAYVRGEENLAGWRPRSDSLILDHQWELEKLSLLQEVEKTRHYLLLREKLETAQRPVPEALSPAFSEDSESHGSSSASSPLSAEGRPSPLEAPNERQRELAVKCLRLLTHTFNREYTHSHVCVSASESKLSEMSVTLLRDPSMSPLGVATLTPSSTCPSLVEGRYGATDLRTPQPCSRPASPEPELLPEADSKKLPSPARATETDKEPQRLLVPDIQEIRVSPIVSKKGYLHFLEPHTSGWARRFVVVRRPYAYMYNSDKDTVERFVLNLATAQVEYSEDQQAMLKTPNTFAVCTEHRGILLQAASDKDMHDWLYAFNPLLAGTIRSKLSRRRSAQMRVKVPVFTLEDFVGDWRQTAGYNLDQVLEQGGVSSLFQNLGVSVTPIQRIVLSGENGLKIDIHVIIPYEGLSGDQMGQIEKIFKVVYPVDDHHFKVILHYGTLVIDGVTPNMIDYFGRPYEGIAVFDGKKITVTGTLWNGNKIIDERLINPDGSLLFRVTINGVTGWRLCERILAGGGGSPSRLEEELRRRLTEP

SEQ ID NO: 395 - protein, 1536 aa, Artificial Sequence
  Description of Artificial Sequence: Synthetic polypeptide
MSRSRASIHRGSIPAMSYAPFRDVRGPSMHRTQYVHSPYDRPGWNPRFCIISGNQLLMLDEDEIHPLLIRDRRSESSRNKLLRRTVSVPVEGRPHGEHEYHLGRSRRKSVPGGKQYSMEGAPAAPFRPSQGFLSRRLKSSIKRTKSQPKLDRTSSFRQILPRFRSADHDRARLMQSFKESHSHESLLSPSSAAEALELNLDEDSIIKPVHSSILGQEFCFEVTTSSGTKCFACRSAAERDKWIENLQRAVKPNKDNSRRVDNVLKLWIIEARELPPKKRYYCELCLDDMLYARTTSKPRSASGDTVFWGEHFEFNNLPAVRALRLHLYRDSDKKRKKDKAGYVGLVTVPVATLAGRHFTEQWYPVTLPTGSGGSGGMGSGGGGGSGGGSGGKGKGGCPAVRLKARYQTMSILPMELYKEFAEYVTNHYRMLCAVLEPALNVKGKEEVASALVHILQSTGKAKDFLSDMAMSEVDRFMEREHLIFRENTLATKAIEEYMRLIGQKYLKDAIGEFIRALYESEENCEVDPIKCTASSLAEHQANLRMCCELALCKVVNSHCVFPRELKEVFASWRLRCAERGREDIADRLISASLFLRFLCPAIMSPSLFGLMQEYPDEQTSRTLTLIAKVIQNLANFSKFTSKEDFLGFMNEFLELEWGSMQQFLYEISNLDTLTNSSSFEGYIDLGRELSTLHALLWEVLPQLSKEALLKLGPLPRLLNDISTALRNPNIQRQPSRQSERPRPQPVVLRGPSAEMQGYMMRDLNSSIDLQSFMARGLNSSMDMARLPSPTKEKPPPPPPGGGKDLFYVSRPPLARSSPAYCTSSSDITEPEQKMLSVNKSVSMLDLQGDGPGGRLNSSSVSNLAAVGDLLHSSQASLTAALGLRPAPAGRLSQGSGSSITAAGMRLSQMGVTTDGVPAQQLRIPLSFQNPLFHMAADGPGPPGGHGGGGGHGPPSSHHHHHHHHHHRGGEPPGDTFAPFHGYSKSEDLSSGVPKPPAASILHSHSYSDEFGPSGTDFTRRQLSLQDNLQHMLSPPQITIGPQRPAPSGPGGGSGGGSGGGGGGQPPPLQRGKSQQLTVSAAQKPRPSSGNLLQSPEPSYGPARPRQQSLSKEGSIGGSGGSGGGGGGGLKPSITKQHSQTPSTLNPTMPASERTVAWVSNMPHLSADIESAHIEREEYKLKEYSKSMDESRLDRVKEYEEEIHSLKERLHMSNRKLEEYERRLLSQEEQTSKILMQYQARLEQSEKRLRQQQAEKDSQIKSIIGRLMLVEEELRRDHPAMAEPLPEPKKRLLDAQERQLPPLGPTNPRVTLAPPWNGLAPPAPPPPPRLQITENGEFRNTADHKVPVFTLEDFVGDWRQTAGYNLDQVLEQGGVSSLFQNLGVSVTPIQRIVLSGENGLKIDIHVIIPYEGLSGDQMGQIEKIFKVVYPVDDHHFKVILHYGTLVIDGVTPNMIDYFGRPYEGIAVFDGKKITVTGTLWNGNKIIDERLINPDGSLLFRVTINGVTGWRLCERILAGGGGSPSRLEEELRRRLTEP

SEQ ID NO: 396 - protein, 290 aa, Artificial Sequence
  Description of Artificial Sequence: Synthetic polypeptide
MASSAELDFNLQALLEQLSQDELSKFKSLIRTISLGKELQTVPQTEVDKANGKQLVEIFTSHSCSYWAGMAAIQVFEKMNQTHLSGRADEHCVMPPPKVPVFTLEDFVGDWRQTAGYNLDQVLEQGGVSSLFQNLGVSVTPIQRIVLSGENGLKIDIHVIIPYEGLSGDQMGQIEKIFKVVYPVDDHHFKVILHYGTLVIDGVTPNMIDYFGRPYEGIAVFDGKKITVTGTLWNGNKIIDERLINPDGSLLFRVTINGVTGWRLCERILAGGGGSPSRLEEELRRRLTEP

SEQ ID NO: 397 - protein, 291 aa, Artificial Sequence
  Description of Artificial Sequence: Synthetic polypeptide
MMCGAPSATQPATAETQHIADQVRSQLEEKENKKFPVFKAVSFKSQVVAGTNYFIKVHVGDEDFVHLRVFQSLPHENKPLTLSNYQTNKAKHDELTYFKVPVFTLEDFVGDWRQTAGYNLDQVLEQGGVSSLFQNLGVSVTPIQRIVLSGENGLKIDIHVIIPYEGLSGDQMGQIEKIFKVVYPVDDHHFKVILHYGTLVIDGVTPNMIDYFGRPYEGIAVFDGKKITVTGTLWNGNKIIDERLINPDGSLLFRVTINGVTGWRLCERILAGGGGSPSRLEEELRRRLTEP

SEQ ID NO: 398 - protein, 297 aa, Artificial Sequence
  Description of Artificial Sequence: Synthetic polypeptide
MAGKAHRLSAEERDQLLPNLRAVGWNELEGRDAIFKQFHFKDFNRAFGFMTRVALQAEKLDHHPEWFNVYNKVHITLSTHECAGLSERDINLASFIEQVAVSMTKVPVFTLEDFVGDWRQTAGYNLDQVLEQGGVSSLFQNLGVSVTPIQRIVLSGENGLKIDIHVIIPYEGLSGDQMGQIEKIFKVVYPVDDHHFKVILHYGTLVIDGVTPNMIDYFGRPYEGIAVFDGKKITVTGTLWNGNKIIDERLINPDGSLLFRVTINGVTGWRLCERILAGGGGSPSRLEEELRRRLTEP

SEQ ID NO: 399 - protein, 706 aa, Artificial Sequence
  Description of Artificial Sequence: Synthetic polypeptide
MEDAKNIKKGPAPFYPLEDGTAGEQLHKAMKRYALVPGTIAFTDAHIEVDITYAEYFEMSVRLAEAMKRYGLNTNHRIVVCSENSLQFFMPVLGALFIGVAVAPANDIYNERELLNSMGISQPTVVFVSKKGLQKILNVQKKLPIIQKIIIMDSKTDYQGFQSMYTFVTSHLPPGFNEYDFVPESFDRDKTIALIMNSSGSTGLPKGVALPHRTACVRFSHARDPIFGNQIIPDTAILSVVPFHHGFGMFTTLGYLICGFRVVLMYRFEEELFLRSLQDYKIQSALLVPTLFSFFAKSTLIDKYDLSNLHEIASGGAPLSKEVGEAVAKRFHLPGIRQGYGLTETTSAILITPEGDDKPGAVGKVVPFFEAKVVDLDTGKTLGVNQRGELCVRGPMIMSGYVNNPEATNALIDKDGWLHSGDIAYWDEDEHFFIVDRLKSLIKYKGYQVAPAELESILLQHPNIFDAGVAGLPDDDAGELPAAVVVLEHGKTMTEKEIVDYVASQVTTAKKLRGGVVFVDEVPKGLTGKLDARKIREILIKAKKGGKIAVTRLKGSGATNFSLLKQAGDVEENPGPRSGTGSSGEVQLQESGGGLVQPGGSLRLSCTASGVTISALNAMAMGWYRQAPGERRVMVAAVSERGNAMYRESVQGRFTVTRDFTNKMVSLQMDNLKPEDTAVYYCHVLEDRVDSFHDYWGQGTQVTVSS

SEQ ID NO: 400 - protein, 976 aa, Artificial Sequence
  Description of Artificial Sequence: Synthetic polypeptide
MEDAKNIKKGPAPFYPLEDGTAGEQLHKAMKRYALVPGTIAFTDAHIEVDITYAEYFEMSVRLAEAMKRYGLNTNHRIVVCSENSLQFFMPVLGALFIGVAVAPANDIYNERELLNSMGISQPTVVFVSKKGLQKILNVQKKLPIIQKIIIMDSKTDYQGFQSMYTFVTSHLPPGFNEYDFVPESFDRDKTIALIMNSSGSTGLPKGVALPHRTACVRFSHARDPIFGNQIIPDTAILSVVPFHHGFGMFTTLGYLICGFRVVLMYRFEEELFLRSLQDYKIQSALLVPTLFSFFAKSTLIDKYDLSNLHEIASGGAPLSKEVGEAVAKRFHLPGIRQGYGLTETTSAILITPEGDDKPGAVGKVVPFFEAKVVDLDTGKTLGVNQRGELCVRGPMIMSGYVNNPEATNALIDKDGWLHSGDIAYWDEDEHFFIVDRLKSLIKYKGYQVAPAELESILLQHPNIFDAGVAGLPDDDAGELPAAVVVLEHGKTMTEKEIVDYVASQVTTAKKLRGGVVFVDEVPKGLTGKLDARKIREILIKAKKGGKIAVTRLKGSGATNFSLLKQAGDVEENPGPRSGTGSPPSFSEGSGGSRTPEKGFSDREPTRPPRPILQRQDDIVQEKRLSRGISHASSSIVSLARSHVSSNGGGGGSNEHPLEMPICAFQLPDLTVYNEDFRSFIERDLIEQSMLVALEQAGRLNWWVSVDPTSQRLLPLATTGDGNCLLHAASLGMWGFHDRDLMLRKALYALMEKGVEKEALKRRWRWQQTQQNKESGLVYTEDEWQKEWNELIKLASSEPRMHLGTNGANCGGVESSEEPVYESLEEFHVFVLAHVLRRPIVVVADTMLRDSGGEAFAPIPFGGIYLPLEVPASQCHRSPLVLAYDQAHFSALVSMEQKENTKEQAVIPLTDSEYKLLPLHFAVDPGKGWEWGKDDSDNVRLASVILSLEVKLHLLHSYMNVKWIPLSSDAQAPLAQ

SEQ ID NO: 401 - protein, 1106 aa, Artificial Sequence
  Description of Artificial Sequence: Synthetic polypeptide
MEDAKNIKKGPAPFYPLEDGTAGEQLHKAMKRYALVPGTIAFTDAHIEVDITYAEYFEMSVRLAEAMKRYGLNTNHRIVVCSENSLQFFMPVLGALFIGVAVAPANDIYNERELLNSMGISQPTVVFVSKKGLQKILNVQKKLPIIQKIIIMDSKTDYQGFQSMYTFVTSHLPPGFNEYDFVPESFDRDKTIALIMNSSGSTGLPKGVALPHRTACVRFSHARDPIFGNQIIPDTAILSVVPFHHGFGMFTTLGYLICGFRVVLMYRFEEELFLRSLQDYKIQSALLVPTLFSFFAKSTLIDKYDLSNLHEIASGGAPLSKEVGEAVAKRFHLPGIRQGYGLTETTSAILITPEGDDKPGAVGKVVPFFEAKVVDLDTGKTLGVNQRGELCVRGPMIMSGYVNNPEATNALIDKDGWLHSGDIAYWDEDEHFFIVDRLKSLIKYKGYQVAPAELESILLQHPNIFDAGVAGLPDDDAGELPAAVVVLEHGKTMTEKEIVDYVASQVTTAKKLRGGVVFVDEVPKGLTGKLDARKIREILIKAKKGGKIAVTRLKGSGATNFSLLKQAGDVEENPGPRSGTGSSGEVQLQESGGGLVQPGGSLRLSCTASGVTISALNAMAMGWYRQAPGERRVMVAAVSERGNAMYRESVQGRFTVTRDFTNKMVSLQMDNLKPEDTAVYYCHVLEDRVDSFHDYWGQGTQVTVSSGAPGSGPPSFSEGSGGSRTPEKGFSDREPTRPPRPILQRQDDIVQEKRLSRGISHASSSIVSLARSHVSSNGGGGGSNEHPLEMPICAFQLPDLTVYNEDFRSFIERDLIEQSMLVALEQAGRLNWWVSVDPTSQRLLPLATTGDGNCLLHAASLGMWGFHDRDLMLRKALYALMEKGVEKEALKRRWRWQQTQQNKESGLVYTEDEWQKEWNELIKLASSEPRMHLGTNGANCGGVESSEEPVYESLEEFHVFVLAHVLRRPIVVVADTMLRDSGGEAFAPIPFGGIYLPLEVPASQCHRSPLVLAYDQAHFSALVSMEQKENTKEQAVIPLTDSEYKLLPLHFAVDPGKGWEWGKDDSDNVRLASVILSLEVKLHLLHSYMNVKWIPLSSDAQAPLAQ

SEQ ID NO: 402 - protein, 30 aa, Artificial Sequence
  Description of Artificial Sequence: Synthetic polypeptide
AHFKISGEKRPSTDPGKKAKNPKKKKKKDP

SEQ ID NO: 403 - protein, 12 aa, Artificial Sequence
  Description of Artificial Sequence: Synthetic peptide
AHRAKKMSKTHA

SEQ ID NO: 404 - protein, 14 aa, Artificial Sequence
  Description of Artificial Sequence: Synthetic peptide
ASPEYVNLPINGNG

SEQ ID NO: 405 - protein, 7 aa, Artificial Sequence
  Description of Artificial Sequence: Synthetic peptide
CTKRPRW

SEQ ID NO: 406 - protein, 16 aa, Artificial Sequence
  Description of Artificial Sequence: Synthetic peptide
DKAKRVSRNKSEKKRR

SEQ ID NO: 407 - protein, 15 aa, Artificial Sequence
  Description of Artificial Sequence: Synthetic peptide
EELRLKEELLKGIYA

SEQ ID NO: 408 - protein, 16 aa, Artificial Sequence
  Description of Artificial Sequence: Synthetic peptide
EEQLRRRKNSRLNNTG

SEQ ID NO: 409 - protein, 24 aa, Artificial Sequence
  Description of Artificial Sequence: Synthetic peptide
EVLKVIRTGKRKKKAWKRMVTKVC

SEQ ID NO: 410 - protein, 15 aa, Artificial Sequence
  Description of Artificial Sequence: Synthetic peptide
HHHHHHHHHHHHQPH

SEQ ID NO: 411 - protein, 17 aa, Artificial Sequence
  Description of Artificial Sequence: Synthetic peptide
HKKKHPDASVNFSEFSK

SEQ ID NO: 412 - protein, 9 aa, Artificial Sequence
  Description of Artificial Sequence: Synthetic peptide
HKRTKKNLS

SEQ ID NO: 413 - protein, 29 aa, Artificial Sequence
  Description of Artificial Sequence: Synthetic peptide
IINGRKLKLKKSRRRSSQTSNNSFTSRRS

SEQ ID NO: 414 - protein, 8 aa, Artificial Sequence
  Description of Artificial Sequence: Synthetic peptide
KAEQERRK

SEQ ID NO: 415 - protein, 18 aa, Artificial Sequence
  Description of Artificial Sequence: Synthetic peptide
KEKRKRREELFIEQKKRK

SEQ ID NO: 416 - protein, 14 aa, Artificial Sequence
  Description of Artificial Sequence: Synthetic peptide
KKGKDEWFSRGKKP

SEQ ID NO: 417 - protein, 15 aa, Artificial Sequence
  Description of Artificial Sequence: Synthetic peptide
KKGPSVQKRKKTNLS

SEQ ID NO: 418 - protein, 16 aa, Artificial Sequence
  Description of Artificial Sequence: Synthetic peptide
KKKTVINDLLHYKKEK

SEQ ID NO: 419 - protein, 17 aa, Artificial Sequence
  Description of Artificial Sequence: Synthetic peptide
KKNGGKGKNKPSAKIKK

SEQ ID NO: 420 - protein, 13 aa, Artificial Sequence
  Description of Artificial Sequence: Synthetic peptide
KKPKWDDFKKKKK

SEQ ID NO: 421 - protein, 9 aa, Artificial Sequence
  Description of Artificial Sequence: Synthetic peptide
KKRKKDNLS

SEQ ID NO: 422 - protein, 9 aa, Artificial Sequence
  Description of Artificial Sequence: Synthetic peptide
KKRRKRRRK

SEQ ID NO: 423 - protein, 9 aa, Artificial Sequence
  Description of Artificial Sequence: Synthetic peptide
KKRRRRARK

SEQ ID NO: 424 - protein, 7 aa, Artificial Sequence
  Description of Artificial Sequence: Synthetic peptide
KKSKRGR

SEQ ID NO: 425 - protein, 8 aa, Artificial Sequence
  Description of Artificial Sequence: Synthetic peptide
KKSRKRGS

SEQ ID NO: 426 - protein, 17 aa, Artificial Sequence
  Description of Artificial Sequence: Synthetic peptide
KKSTALSRELGKIMRRR

SEQ ID NO: 427 - protein, 17 aa, Artificial Sequence
  Description of Artificial Sequence: Synthetic peptide
KKSYQDPEIIAHSRPRK

SEQ ID NO: 428 - protein, 17 aa, Artificial Sequence
  Description of Artificial Sequence: Synthetic peptide
KKTGKNRKLKSKRVKTR

SEQ ID NO: 429 - protein, 17 aa, Artificial Sequence
  Description of Artificial Sequence: Synthetic peptide
KKVSIAGQSGKLWRWKR

SEQ ID NO: 430 - protein, 20 aa, Artificial Sequence
  Description of Artificial Sequence: Synthetic peptide
KKYENVVIKRSPRKRGRPRK

SEQ ID NO: 431 - protein, 6 aa, Artificial Sequence
  Description of Artificial Sequence: Synthetic peptide
KNKKRK

SEQ ID NO: 432 - protein, 6 aa, Artificial Sequence
  Description of Artificial Sequence: Synthetic peptide
KPKKKR

SEQ ID NO: 433 - protein, 19 aa, Artificial Sequence
  Description of Artificial Sequence: Synthetic peptide
KRAMKDDSHGNSTSPKRRK

SEQ ID NO: 434 - protein, 17 aa, Artificial Sequence
  Description of Artificial Sequence: Synthetic peptide
KRANSNLVAAYEKAKKK

SEQ ID NO: 435 - protein, 22 aa, Artificial Sequence
  Description of Artificial Sequence: Synthetic peptide
KRASEDTTSGSPPKKSSAGPKR

SEQ ID NO: 436 - protein, 16 aa, Artificial Sequence
  Description of Artificial Sequence: Synthetic peptide
KRFKRRWMVRKMKTKK

SEQ ID NO: 437 - protein, 16 aa, Artificial Sequence
  Description of Artificial Sequence: Synthetic peptide
KRGLNSSFETSPKKVK

SEQ ID NO: 438 - protein, 20 aa, Artificial Sequence
  Description of Artificial Sequence: Synthetic peptide
KRGNSSIGPNDLSKRKQRKK

SEQ ID NO: 439 - protein, 23 aa, Artificial Sequence
  Description of Artificial Sequence: Synthetic peptide
KRIHSVSLSQSQIDPSKKVKRAK

SEQ ID NO: 440 - protein, 15 aa, Artificial Sequence
  Description of Artificial Sequence: Synthetic peptide
KRKGKLKNKGSKRKK

SEQ ID NO: 441 - protein, 13 aa, Artificial Sequence
  Description of Artificial Sequence: Synthetic peptide
KRRRRRRREKRKR

SEQ ID NO: 442 - protein, 18 aa, Artificial Sequence
  Description of Artificial Sequence: Synthetic peptide
KRSNDRTYSPEEEKQRRA

SEQ ID NO: 443 - protein, 21 aa, Artificial Sequence
  Description of Artificial Sequence: Synthetic peptide
KRTVATNGDASGAHRAKKMSK

SEQ ID NO: 444 - protein, 20 aa, Artificial Sequence
  Description of Artificial Sequence: Synthetic peptide
KRVYNKGEDEQEHLPKGKKR

SEQ ID NO: 445 - protein, 18 aa, Artificial Sequence
  Description of Artificial Sequence: Synthetic peptide
KSGKAPRRRAVSMDNSNK

SEQ ID NO: 446 - protein, 19 aa, Artificial Sequence
  Description of Artificial Sequence: Synthetic peptide
KVNFLDMSLDDIIIYKELE

SEQ ID NO: 447 - protein, 15 aa, Artificial Sequence
  Description of Artificial Sequence: Synthetic peptide
KVQHRIAKKTTRRRR

SEQ ID NO: 448 - protein, 8 aa, Artificial Sequence
  Description of Artificial Sequence: Synthetic peptide
LSPSLSPL

SEQ ID NO: 449 - protein, 30 aa, Artificial Sequence
  Description of Artificial Sequence: Synthetic polypeptide
MDSLLMNRRKFLYQFKNVRWAKGRRETYLC

SEQ ID NO: 450 - protein, 52 aa, Artificial Sequence
  Description of Artificial Sequence: Synthetic polypeptide
MPQNEYIELHRKRYGYRLDYHEKKRKKESREAHERSKKAKKMIGLKAKLYHK

SEQ ID NO: 451 - protein, 10 aa, Artificial Sequence
  Description of Artificial Sequence: Synthetic peptide
MVQLRPRASR

SEQ ID NO: 452 - protein, 24 aa, Artificial Sequence
  Description of Artificial Sequence: Synthetic peptide
NNKLLAKRRKGGASPKDDPMDDIK

SEQ ID NO: 453 - protein, 20 aa, Artificial Sequence
  Description of Artificial Sequence: Synthetic peptide
NYKRPMDGTYGPPAKRHEGE

SEQ ID NO: 454 - protein, 19 aa, Artificial Sequence
  Description of Artificial Sequence: Synthetic peptide
PDTKRAKLDSSETTMVKKK

SEQ ID NO: 455 - protein, 7 aa, Artificial Sequence
  Description of Artificial Sequence: Synthetic peptide
PEKRTKI

SEQ ID NO: 456 - protein, 8 aa, Artificial Sequence
  Description of Artificial Sequence: Synthetic peptide
PGGRGKKK

SEQ ID NO: 457 - protein, 18 aa, Artificial Sequence
  Description of Artificial Sequence: Synthetic peptide
PGKMDKGEHRQERRDRPY

SEQ ID NO: 458 - protein, 11 aa, Artificial Sequence
  Description of Artificial Sequence: Synthetic peptide
PKKGDKYDKTD

SEQ ID NO: 459 - protein, 7 aa, Artificial Sequence
  Description of Artificial Sequence: Synthetic peptide
PKKKSRK

SEQ ID NO: 460 - protein, 7 aa, Artificial Sequence
  Description of Artificial Sequence: Synthetic peptide
PKKNKPE

SEQ ID NO: 461 - protein, 7 aa, Artificial Sequence
  Description of Artificial Sequence: Synthetic peptide
PKKRAKV

SEQ ID NO: 462 - protein, 9 aa, Artificial Sequence
  Description of Artificial Sequence: Synthetic peptide
PKPKKLKVE

SEQ ID NO: 463 - protein, 7 aa, Artificial Sequence
  Description of Artificial Sequence: Synthetic peptide
PKRGRGR

SEQ ID NO: 464 - protein, 9 aa, Artificial Sequence
  Description of Artificial Sequence: Synthetic peptide
PKRRLVDDA

SEQ ID NO: 465 - protein, 7 aa, Artificial Sequence
  Description of Artificial Sequence: Synthetic peptide
PKRRRTY

SEQ ID NO: 466 - protein, 6 aa, Artificial Sequence
  Description of Artificial Sequence: Synthetic peptide
PLFKRR

SEQ ID NO: 467 - protein, 7 aa, Artificial Sequence
  Description of Artificial Sequence: Synthetic peptide
PLRKAKR

SEQ ID NO: 468 - protein, 9 aa, Artificial Sequence
  Description of Artificial Sequence: Synthetic peptide
PPAKRKCIF

SEQ ID NO: 469 - protein, 8 aa, Artificial Sequence
  Description of Artificial Sequence: Synthetic peptide
PPARRRRL

SEQ ID NO: 470 - protein, 8 aa, Artificial Sequence
  Description of Artificial Sequence: Synthetic peptide
PPKKKRKV

SEQ ID NO: 471 - protein, 10 aa, Artificial Sequence
  Description of Artificial Sequence: Synthetic peptide
PPNKRMKVKH

SEQ ID NO: 472 - protein, 13 aa, Artificial Sequence
  Description of Artificial Sequence: Synthetic peptide
PPRIYPQLPSAPT

SEQ ID NO: 473 - protein, 13 aa, Artificial Sequence
  Description of Artificial Sequence: Synthetic peptide
PQRSPFPKSSVKR

SEQ ID NO: 474 - protein, 8 aa, Artificial Sequence
  Description of Artificial Sequence: Synthetic peptide
PRPRKVPR

SEQ ID NO: 475 - protein, 9 aa, Artificial Sequence
  Description of Artificial Sequence: Synthetic peptide
PRRRVQRKR

SEQ ID NO: 476 - protein, 7 aa, Artificial Sequence
  Description of Artificial Sequence: Synthetic peptide
PRRVRLK

SEQ ID NO: 477 - protein, 7 aa, Artificial Sequence
  Description of Artificial Sequence: Synthetic peptide
PSRKRPR

SEQ ID NO: 478 - protein, 8 aa, Artificial Sequence
  Description of Artificial Sequence: Synthetic peptide
PSSKKRKV

SEQ ID NO: 479 - protein, 7 aa, Artificial Sequence
  Description of Artificial Sequence: Synthetic peptide
PTKKRVK

SEQ ID NO: 480 - protein, 9 aa, Artificial Sequence
  Description of Artificial Sequence: Synthetic peptide
QRPGPYDRP

SEQ ID NO: 481 - protein, 18 aa, Artificial Sequence
  Description of Artificial Sequence: Synthetic peptide
RGKGGKGLGKGGAKRHRK

SEQ ID NO: 482 - protein, 24 aa, Artificial Sequence
  Description of Artificial Sequence: Synthetic peptide
RKAGKGGGGHKTTKKRSAKDEKVP

SEQ ID NO: 483 - protein, 9 aa, Artificial Sequence
  Description of Artificial Sequence: Synthetic peptide
RKIKLKRAK

SEQ ID NO: 484 - protein, 9 aa, Artificial Sequence
  Description of Artificial Sequence: Synthetic peptide
RKIKRKRAK

SEQ ID NO: 485 - protein, 17 aa, Artificial Sequence
  Description of Artificial Sequence: Synthetic peptide
RKKEAPGPREELRSRGR

SEQ ID NO: 486 - protein, 7 aa, Artificial Sequence
  Description of Artificial Sequence: Synthetic peptide
RKKRKGK

SEQ ID NO: 487 - protein, 9 aa, Artificial Sequence
  Description of Artificial Sequence: Synthetic peptide
RKKRRQRRR

SEQ ID NO: 488 - protein, 25 aa, Artificial Sequence
  Description of Artificial Sequence: Synthetic peptide
RKKSIPLSIKNLKRKHKRKKNKITR

SEQ ID NO: 489 - protein, 20 aa, Artificial Sequence
  Description of Artificial Sequence: Synthetic peptide
RKLVKPKNTKMKTKLRTNPY

SEQ ID NO: 490 - protein, 16 aa, Artificial Sequence
  Description of Artificial Sequence: Synthetic peptide
RKRLILSDKGQLDWKK

SEQ ID NO: 491 - protein, 7 aa, Artificial Sequence
  Description of Artificial Sequence: Synthetic peptide
RKRLKSK

SEQ ID NO: 492 - protein, 9 aa, Artificial Sequence
  Description of Artificial Sequence: Synthetic peptide
RKRRVRDNM

SEQ ID NO: 493 - protein, 22 aa, Artificial Sequence
  Description of Artificial Sequence: Synthetic peptide
RKRSPKDKKEKDLDGAGKRRKT

SEQ ID NO: 494 - protein, 22 aa, Artificial Sequence
  Description of Artificial Sequence: Synthetic peptide
RKRTPRVDGQTGENDMNKRRRK

SEQ ID NO: 495 - protein, 10 aa, Artificial Sequence
  Description of Artificial Sequence: Synthetic peptide
RLPVRRRRRR

SEQ ID NO: 496 - protein, 10 aa, Artificial Sequence
  Description of Artificial Sequence: Synthetic peptide
RLRFRKPKSK

SEQ ID NO: 497 - protein, 6 aa, Artificial Sequence
  Description of Artificial Sequence: Synthetic peptide
RQQRKR

SEQ ID NO: 498 - protein, 16 aa, Artificial Sequence
  Description of Artificial Sequence: Synthetic peptide
RRDLNSSFETSPKKVK

SEQ ID NO: 499 - protein, 8 aa, Artificial Sequence
  Description of Artificial Sequence: Synthetic peptide
RRDRAKLR

SEQ ID NO: 500 - protein, 8 aa, Artificial Sequence
  Description of Artificial Sequence: Synthetic peptide
RRGDGRRR

SEQ ID NO: 501 - protein, 11 aa, Artificial Sequence
  Description of Artificial Sequence: Synthetic peptide
RRGRKRKAEKQ

SEQ ID NO: 502 - protein, 6 aa, Artificial Sequence
  Description of Artificial Sequence: Synthetic peptide
RRKKRR

SEQ ID NO: 503 - protein, 19 aa, Artificial Sequence
  Description of Artificial Sequence: Synthetic peptide
RRKRSKSEDMDSVESKRRR

SEQ ID NO: 504 - protein, 6 aa, Artificial Sequence
  Description of Artificial Sequence: Synthetic peptide
RRKRSR

SEQ ID NO: 505 - protein, 14 aa, Artificial Sequence
  Description of Artificial Sequence: Synthetic peptide
RRPKGKTLQKRKPK

SEQ ID NO: 506 - protein, 18 aa, Artificial Sequence
  Description of Artificial Sequence: Synthetic peptide
RRRGFERFGPDNMGRKRK

SEQ ID NO: 507 - protein, 15 aa, Artificial Sequence
  Description of Artificial Sequence: Synthetic peptide
RRRGKNKVAAQNCRK

SEQ ID NO: 508 - protein, 9 aa, Artificial Sequence
  Description of Artificial Sequence: Synthetic peptide
RRRKRRNLS

SEQ ID NO: 509 - protein, 14 aa, Artificial Sequence
  Description of Artificial Sequence: Synthetic peptide
RRRQKQKGGASRRR

SEQ ID NO: 510 - protein, 13 aa, Artificial Sequence
  Description of Artificial Sequence: Synthetic peptide
RRRREGPRARRRR

SEQ ID NO: 511 - protein, 61 aa, Artificial Sequence
  Description of Artificial Sequence: Synthetic polypeptide
RRTIRLKLVYDKCDRSCKIQKKNRNKCQYCRFHKCLSVGMSHNAIRFGRMPRSEKAKLKAE

SEQ ID NO: 512 - protein, 17 aa, Artificial Sequence
  Description of Artificial Sequence: Synthetic peptide
RRVPQRKEVSRCRKCRK

SEQ ID NO: 513 - protein, 32 aa, Artificial Sequence
  Description of Artificial Sequence: Synthetic polypeptide
RVGGRRQAVECIEDLLNEPGQPLDLSCKRPRP

SEQ ID NO: 514 - protein, 9 aa, Artificial Sequence
  Description of Artificial Sequence: Synthetic peptide
RVVKLRIAP

SEQ ID NO: 515 - protein, 6 aa, Artificial Sequence
  Description of Artificial Sequence: Synthetic peptide
RVVRRR

SEQ ID NO: 516 - protein, 12 aa, Artificial Sequence
  Description of Artificial Sequence: Synthetic peptide
SKRKTKISRKTR

SEQ ID NO: 517 - protein, 16 aa, Artificial Sequence
  Description of Artificial Sequence: Synthetic peptide
SYVKTVPNRTRTYIKL

SEQ ID NO: 518 - protein, 12 aa, Artificial Sequence
  Description of Artificial Sequence: Synthetic peptide
TGKNEAKKRKIA

SEQ ID NO: 519 - protein, 30 aa, Artificial Sequence
  Description of Artificial Sequence: Synthetic polypeptide
TLSPASSPSSVSCPVIPASTDESPGSALNI

SEQ ID NO: 520 - protein, 5 aa, Artificial Sequence
  Description of Artificial Sequence: Synthetic peptide
GSSSS

SEQ ID NO: 521 - protein, 10 aa, Artificial Sequence
  Description of Artificial Sequence: Synthetic peptide
GSSSSGSSSS

SEQ ID NO: 522 - protein, 15 aa, Artificial Sequence
  Description of Artificial Sequence: Synthetic peptide
GSSSSGSSSSGSSSS

SEQ ID NO: 523 - protein, 6 aa, Artificial Sequence
  Description of Artificial Sequence: Synthetic 6xHis tag
HHHHHH
